United States Patent Application Publication US 2011/0165568 A1 - sequence listing, part 5

SEQ ID NO: 1695 - DNA, 5076356 bp, Escherichia coli (residues 2,538,179-3,807,267 of 5,076,356)
  Strain O55:H7
  modified_base (225)..(225): a, c, g or t
  modified_base (1111)..(1112): a, c, g or t
  modified_base (1607)..(1622): a, c, g or t
  modified_base (4457)..(4460): a, c, g or t
  modified_base (6633)..(6633): a, c, g or t
  modified_base (7135)..(7139): a, c, g or t
  modified_base (11714)..(11714): a, c, g or t
  modified_base (12007)..(12009): a, c, g or t
  modified_base (12012)..(12013): a, c, g or t
  modified_base (13584)..(13585): a, c, g or t
  modified_base (15530)..(15530): a, c, g or t
  modified_base (15818)..(15821): a, c, g or t
  modified_base (18780)..(18789): a, c, g or t
  modified_base (19304)..(19308): a, c, g or t
  modified_base (19732)..(19743): a, c, g or t
  modified_base (24367)..(24373): a, c, g or t
  modified_base (24782)..(24785): a, c, g or t
  modified_base (25579)..(25595): a, c, g or t
  modified_base (28480)..(28480): a, c, g or t
  modified_base (29283)..(29286): a, c, g or t
  modified_base (29291)..(29295): a, c, g or t
  modified_base (31649)..(31652): a, c, g or t
  modified_base (34426)..(34426): a, c, g or t
  modified_base (36376)..(36379): a, c, g or t
  modified_base (36381)..(36384): a, c, g or t
  modified_base (36889)..(36889): a, c, g or t
  modified_base (39884)..(39884): a, c, g or t
  modified_base (45140)..(45140): a, c, g or t
  modified_base (45551)..(45551): a, c, g or t
  modified_base (45915)..(45920): a, c, g or t
  modified_base (46403)..(46407): a, c, g or t
  modified_base (48459)..(48459): a, c, g or t
  modified_base (49809)..(49809): a, c, g or t
  modified_base (50356)..(50356): a, c, g or t
  modified_base (52612)..(52612): a, c, g or t
  modified_base (56077)..(56077): a, c, g or t
  modified_base (58998)..(58998): a, c, g or t
  modified_base (62027)..(62027): a, c, g or t
  modified_base (64105)..(64108): a, c, g or t
  modified_base (64241)..(64241): a, c, g or t
  modified_base (67678)..(67678): a, c, g or t
  modified_base (67797)..(67801): a, c, g or t
  modified_base (71722)..(71722): a, c, g or t
  modified_base (73394)..(73397): a, c, g or t
  modified_base (73688)..(73688): a, c, g or t
  modified_base (74659)..(74659): a, c, g or t
  modified_base (87797)..(87797): a, c, g or t
  modified_base (97642)..(97646): a, c, g or t
  modified_base (98093)..(98093): a, c, g or t
  modified_base (98096)..(98096): a, c, g or t
  modified_base (102287)..(102287): a, c, g or t
  modified_base (105479)..(105479): a, c, g or t
  modified_base (106453)..(106455): a, c, g or t
  modified_base (106458)..(106459): a, c, g or t
  modified_base (109656)..(109657): a, c, g or t
  modified_base (123248)..(123250): a, c, g or t
  modified_base (126289)..(126299): a, c, g or t
  modified_base (129221)..(129221): a, c, g or t
  modified_base (130490)..(130493): a, c, g or t
  modified_base (130923)..(130926): a, c, g or t
  modified_base (135751)..(135751): a, c, g or t
  modified_base (137716)..(137716): a, c, g or t
  modified_base (140865)..(140865): a, c, g or t
  modified_base (143774)..(143777): a, c, g or t
  modified_base (147543)..(147546): a, c, g or t
  modified_base (149125)..(149125): a, c, g or t
  modified_base (151097)..(151098): a, c, g or t
  modified_base (156722)..(156722): a, c, g or t
  modified_base (157927)..(157927): a, c, g or t
  modified_base (159008)..(159008): a, c, g or t
  modified_base (162533)..(162533): a, c, g or t
  modified_base (163259)..(163259): a, c, g or t
  modified_base (163398)..(163398): a, c, g or t
  modified_base (165153)..(165153): a, c, g or t
  modified_base (167388)..(167388): a, c, g or t
  modified_base (175680)..(175681): a, c, g or t
  modified_base (175684)..(175684): a, c, g or t
  modified_base (175965)..(175965): a, c, g or t
  modified_base (177693)..(177693): a, c, g or t
  modified_base (177719)..(177722): a, c, g or t
  modified_base (177724)..(177725): a, c, g or t
  modified_base (179857)..(179870): a, c, g or t
  modified_base (179961)..(179961): a, c, g or t
  modified_base (180353)..(180353): a, c, g or t
  modified_base (190146)..(190149): a, c, g or t
  modified_base (191703)..(191703): a, c, g or t
  modified_base (195215)..(195223): a, c, g or t
  modified_base (198174)..(198174): a, c, g or t
  modified_base (198179)..(198179): a, c, g or t
  modified_base (204512)..(204515): a, c, g or t
  modified_base (205797)..(205804): a, c, g or t
  modified_base (207917)..(207917): a, c, g or t
  modified_base (210045)..(210045): a, c, g or t
  modified_base (210819)..(210819): a, c, g or t
  modified_base (212694)..(212694): a, c, g or t
  modified_base (212776)..(212776): a, c, g or t
  modified_base (212965)..(212965): a, c, g or t
  modified_base (214546)..(214549): a, c, g or t
  modified_base (216428)..(216433): a, c, g or t
  modified_base (218731)..(218731): a, c, g or t
  modified_base (228787)..(228788): a, c, g or t
  modified_base (228790)..(228791): a, c, g or t
  modified_base (229036)..(229037): a, c, g or t
  modified_base (229040)..(229069): a, c, g or t
  modified_base (229154)..(229168): a, c, g or t
  modified_base (229208)..(229208): a, c, g or t
  modified_base (229215)..(229226): a, c, g or t
  modified_base (229412)..(229412): a, c, g or t
  modified_base (229728)..(229736): a, c, g or t
  modified_base (229739)..(229742): a, c, g or t
  modified_base (229828)..(229831): a, c, g or t
  modified_base (230070)..(230078): a, c, g or t
  modified_base (230311)..(230311): a, c, g or t
  modified_base (231196)..(231196): a, c, g or t
  modified_base (237010)..(237013): a, c, g or t
  modified_base (240337)..(240337): a, c, g or t
  modified_base (240732)..(240732): a, c, g or t
  modified_base (240744)..(240744): a, c, g or t
  modified_base (243277)..(243289): a, c, g or t
  modified_base (243525)..(243525): a, c, g or t
  modified_base (243527)..(243528): a, c, g or t
  modified_base (243532)..(243532): a, c, g or t
  modified_base (245081)..(245081): a, c, g or t
  modified_base (247553)..(247553): a, c, g or t
  modified_base (247879)..(247879): a, c, g or t
  modified_base (248819)..(248830): a, c, g or t
  modified_base (253042)..(253042): a, c, g or t
  modified_base (255707)..(255716): a, c, g or t
  modified_base (255719)..(255719): a, c, g or t
  modified_base (256708)..(256711): a, c, g or t
  modified_base (260660)..(260660): a, c, g or t
  modified_base (261192)..(261193): a, c, g or t
  modified_base (261196)..(261197): a, c, g or t
  modified_base (261199)..(261199): a, c, g or t
  modified_base (261205)..(261206): a, c, g or t
  modified_base (261208)..(261210): a, c, g or t
  modified_base (261940)..(261941): a, c, g or t
  modified_base (266146)..(266146): a, c, g or t
  modified_base (267741)..(267741): a, c, g or t
  modified_base (267796)..(267797): a, c, g or t
  modified_base (268132)..(268141): a, c, g or t
  modified_base (268537)..(268540): a, c, g or t
  modified_base (268542)..(268542): a, c, g or t
  modified_base (268544)..(268547): a, c, g or t
  modified_base (269632)..(269634): a, c, g or t
  modified_base (269812)..(269812): a, c, g or t
  modified_base (269863)..(269863): a, c, g or t
  modified_base (269872)..(269872): a, c, g or t
  modified_base (269914)..(269914): a, c, g or t
  modified_base (269956)..(269956): a, c, g or t
  modified_base (269971)..(269971): a, c, g or t
  modified_base (270076)..(270076): a, c, g or t
  modified_base (270552)..(270552): a, c, g or t
  modified_base (270736)..(270736): a, c, g or t
  modified_base (271053)..(271060): a, c, g or t
  modified_base (271415)..(271416): a, c, g or t
  modified_base (271418)..(271420): a, c, g or t
  modified_base (271424)..(271425): a, c, g or t
  modified_base (272354)..(272367): a, c, g or t
  modified_base (273879)..(273879): a, c, g or t
  modified_base (274206)..(274206): a, c, g or t
  modified_base (274218)..(274218): a, c, g or t
  modified_base (274262)..(274263): a, c, g or t
  modified_base (274268)..(274277): a, c, g or t
  modified_base (274290)..(274290): a, c, g or t
  modified_base (274520)..(274520): a, c, g or t
  modified_base (276072)..(276072): a, c, g or t
  modified_base (277861)..(277862): a, c, g or t
  modified_base (278820)..(278835): a, c, g or t
  modified_base (282709)..(282714): a, c, g or t
  modified_base (282716)..(282721): a, c, g or t
  modified_base (283381)..(283381): a, c, g or t
  modified_base (283843)..(283843): a, c, g or t
  modified_base (284031)..(284031): a, c, g or t
  modified_base (284034)..(284037): a, c, g or t
  modified_base (284549)..(284552): a, c, g or t
  modified_base (284555)..(284555): a, c, g or t
  modified_base (284906)..(284906): a, c, g or t
  modified_base (285347)..(285348): a, c, g or t
  modified_base (285435)..(285435): a, c, g or t
  modified_base (286072)..(286072): a, c, g or t
  modified_base (286092)..(286092): a, c, g or t
  modified_base (286347)..(286350): a, c, g or t
  modified_base (286488)..(286488): a, c, g or t
  modified_base (286495)..(286495): a, c, g or t
  modified_base (287082)..(287085): a, c, g or t
  modified_base (292203)..(292203): a, c, g or t
  modified_base (294246)..(294246): a, c, g or t
  modified_base (294298)..(294299): a, c, g or t
  modified_base (295226)..(295226): a, c, g or t
  modified_base (295860)..(295869): a, c, g or t
  modified_base (295871)..(295871): a, c, g or t
  modified_base (296561)..(296564): a, c, g or t
  modified_base (296724)..(296724): a, c, g or t
  modified_base (296941)..(296944): a, c, g or t
  modified_base (297024)..(297027): a, c, g or t
  modified_base (298421)..(298421): a, c, g or t
  modified_base (298681)..(298681): a, c, g or t
  modified_base (304726)..(304727): a, c, g or t
  modified_base (304729)..(304731): a, c, g or t
  modified_base (304734)..(304737): a, c, g or t
  modified_base (304763)..(304773): a, c, g or t
  modified_base (304775)..(304776): a, c, g or t
  modified_base (304890)..(304912): a, c, g or t
  modified_base (304916)..(304917): a, c, g or t
  modified_base (304963)..(304971): a, c, g or t
  modified_base (305015)..(305024): a, c, g or t
  modified_base (305072)..(305073): a, c, g or t
  modified_base (305152)..(305179): a, c, g or t
  modified_base (305204)..(305218): a, c, g or t
  modified_base (305263)..(305273): a, c, g or t
  modified_base (305275)..(305276): a, c, g or t
  modified_base (305280)..(305281): a, c, g or t
  modified_base (305343)..(305364): a, c, g or t
  modified_base (305399)..(305414): a, c, g or t
  modified_base (305416)..(305417): a, c, g or t
  modified_base (305464)..(305639): a, c, g or t
  modified_base (305667)..(305762): a, c, g or t
  modified_base (305777)..(305778): a, c, g or t
  modified_base (305780)..(305784): a, c, g or t
  modified_base (305786)..(305820): a, c, g or t
  modified_base (305822)..(305823): a, c, g or t
  modified_base (305848)..(305851): a, c, g or t
  modified_base (305853)..(305854): a, c, g or t
  modified_base (305876)..(305876): a, c, g or t
  modified_base (305885)..(305886): a, c, g or t
  modified_base (305897)..(305901): a, c, g or t
  modified_base (305912)..(305915): a, c, g or t
  modified_base (305922)..(305923): a, c, g or t
  modified_base (305948)..(306104): a, c, g or t
  modified_base (306140)..(306141): a, c, g or t
  modified_base (306145)..(306146): a, c, g or t
  modified_base (306149)..(306168): a, c, g or t
  modified_base (306200)..(306201): a, c, g or t
  modified_base (306207)..(306227): a, c, g or t
  modified_base (306230)..(306230): a, c, g or t
  modified_base (306268)..(306271): a, c, g or t
  modified_base (306273)..(306274): a, c, g or t
  modified_base (306280)..(306281): a, c, g or t
  modified_base (306358)..(306367): a, c, g or t
  modified_base (306403)..(306433): a, c, g or t
  modified_base (306443)..(306446): a, c, g or t
  modified_base (306764)..(306766): a, c, g or t
  modified_base (307285)..(307286): a, c, g or t
  modified_base (307320)..(307327): a, c, g or t
  modified_base (307386)..(307387): a, c, g or t
  modified_base (307389)..(307391): a, c, g or t
  modified_base (307527)..(307537): a, c, g or t
  modified_base (307564)..(307568): a, c, g or t
  modified_base (307595)..(307634): a, c, g or t
  modified_base (307665)..(307666): a, c, g or t
  modified_base (307672)..(307683): a, c, g or t
  modified_base (307707)..(307761): a, c, g or t
  modified_base (307772)..(307775): a, c, g or t
  modified_base (307778)..(307779): a, c, g or t
  modified_base (307783)..(307861): a, c, g or t
  modified_base (307866)..(307868): a, c, g or t
  modified_base (307884)..(307885): a, c, g or t
  modified_base (307887)..(307887): a, c, g or t
  modified_base (307891)..(307891): a, c, g or t
  modified_base (307894)..(307895): a, c, g or t
  modified_base (307906)..(307933): a, c, g or t
  modified_base (307966)..(307985): a, c, g or t
  modified_base (307999)..(308000): a, c, g or t
  modified_base (308002)..(308003): a, c, g or t
  modified_base (308009)..(309178): a, c, g or t
  modified_base (309184)..(309184): a, c, g or t
  modified_base (309239)..(309278): a, c, g or t
  modified_base (309329)..(309402): a, c, g or t
  modified_base (309435)..(309435): a, c, g or t
  modified_base (309438)..(309477): a, c, g or t
  modified_base (309518)..(309936): a, c, g or t
  modified_base (310016)..(310017): a, c, g or t
  modified_base (310024)..(310033): a, c, g or t
  modified_base (310913)..(310919): a, c, g or t
  modified_base (310922)..(310924): a, c, g or t
  modified_base (311531)..(311534): a, c, g or t
  modified_base (311566)..(311569): a, c, g or t
  modified_base (311573)..(311574): a, c, g or t
  modified_base (311807)..(311808): a, c, g or t
  modified_base (311810)..(311813): a, c, g or t
  modified_base (312447)..(312457): a, c, g or t
  modified_base (313403)..(313416): a, c, g or t
  modified_base (313418)..(313419): a, c, g or t
  modified_base (313884)..(313894): a, c, g or t
  modified_base (314606)..(314609): a, c, g or t
  modified_base (314674)..(314674): a, c, g or t
  modified_base (314676)..(314680): a, c, g or t
  modified_base (316676)..(316692): a, c, g or t
  modified_base (316698)..(316699): a, c, g or t
  modified_base (317909)..(317909): a, c, g or t
  modified_base (324770)..(324773): a, c, g or t
  modified_base (326578)..(326581): a, c, g or t
  modified_base (330166)..(330167): a, c, g or t
  modified_base (330171)..(330171): a, c, g or t
  modified_base (330291)..(330291): a, c, g or t
  modified_base (330295)..(330298): a, c, g or t
  modified_base (331037)..(331037): a, c, g or t
  modified_base (331725)..(331725): a, c, g or t
  modified_base (332259)..(332259): a, c, g or t
  modified_base (332452)..(332452): a, c, g or t
  modified_base (334197)..(334200): a, c, g or t
  modified_base (342348)..(342348): a, c, g or t
  modified_base (343288)..(343288): a, c, g or t
  modified_base (344101)..(344104): a, c, g or t
  modified_base (344218)..(344218): a, c, g or t
  modified_base (344906)..(344921): a, c, g or t
  modified_base (346625)..(346629): a, c, g or t
  modified_base (346740)..(346741): a, c, g or t
  modified_base (346744)..(346757): a, c, g or t
  modified_base (350138)..(350138): a, c, g or t
  modified_base (350515)..(350518): a, c, g or t
  modified_base (360799)..(360805): a, c, g or t
  modified_base (360840)..(360840): a, c, g or t
  modified_base (360843)..(360849): a, c, g or t
  modified_base (360924)..(360937): a, c, g or t
  modified_base (361000)..(361001): a, c, g or t
  modified_base (361007)..(361009): a, c, g or t
  modified_base (361024)..(361037): a, c, g or t
  modified_base (361084)..(361085): a, c, g or t
  modified_base (361111)..(361112): a, c, g or t
  modified_base (361148)..(361216): a, c, g or t
  modified_base (361218)..(361221): a, c, g or t
  modified_base (361249)..(361264): a, c, g or t
  modified_base (361267)..(361267): a, c, g or t
  modified_base (361272)..(361273): a, c, g or t
  modified_base (361324)..(361339): a, c, g or t
  modified_base (361372)..(361373): a, c, g or t
  modified_base (361386)..(361407): a, c, g or t
  modified_base (361444)..(361472): a, c, g or t
  modified_base (361501)..(361502): a, c, g or t
  modified_base (361508)..(361508): a, c, g or t
  modified_base (366317)..(366317): a, c, g or t
  modified_base (368420)..(368420): a, c, g or t
  modified_base (368664)..(368667): a, c, g or t
  modified_base (368683)..(368686): a, c, g or t
  modified_base (370850)..(370851): a, c, g or t
  modified_base (370853)..(370854): a, c, g or t
  modified_base (370951)..(370951): a, c, g or t
  modified_base (371696)..(371696): a, c, g or t
  modified_base (373758)..(373758): a, c, g or t
  modified_base (373761)..(373761): a, c, g or t
  modified_base (373764)..(373767): a, c, g or t
  modified_base (374657)..(374657): a, c, g or t
  modified_base (377547)..(377547): a, c, g or t
  modified_base (377828)..(377828): a, c, g or t
  modified_base (378755)..(378755): a, c, g or t
  modified_base (382559)..(382560): a, c, g or t
  modified_base (386132)..(386132): a, c, g or t
  modified_base (389637)..(389637): a, c, g or t
  modified_base (389641)..(389642): a, c, g or t
  modified_base (389646)..(389647): a, c, g or t
  modified_base (389735)..(389735): a, c, g or t
  modified_base (389776)..(389785): a, c, g or t
  modified_base (389830)..(389831): a, c, g or t
  modified_base (389834)..(389877): a, c, g or t
  modified_base (389955)..(389960): a, c, g or t
  modified_base (389962)..(389962): a, c, g or t
  modified_base (390778)..(390778): a, c, g or t
  modified_base (391623)..(391625): a, c, g or t
  modified_base (391627)..(391628): a, c, g or t
  modified_base (393297)..(393303): a, c, g or t
  modified_base (393330)..(393330): a, c, g or t
  modified_base (394648)..(394648): a, c, g or t
  modified_base (398494)..(398494): a, c, g or t
  modified_base (405814)..(405814): a, c, g or t
  modified_base (406131)..(406134): a, c, g or t
  modified_base (409507)..(409538): a, c, g or t
  modified_base (409540)..(409541): a, c, g or t
  modified_base (409545)..(409546): a, c, g or t
  modified_base (409585)..(409594): a, c, g or t
  modified_base (409597)..(409598): a, c, g or t
  modified_base (409600)..(409601): a, c, g or t
  modified_base (409699)..(409720): a, c, g or t
  modified_base (409804)..(409805): a, c, g or t
  modified_base (409807)..(409808): a, c, g or t
  modified_base (409817)..(409817): a, c, g or t
  modified_base (409994)..(409994): a, c, g or t
  modified_base (410767)..(410767): a, c, g or t
  modified_base (412002)..(412002): a, c, g or t
  modified_base (414113)..(414115): a, c, g or t
  modified_base (420680)..(420680): a, c, g or t
  modified_base (422928)..(422928): a, c, g or t
  modified_base (424581)..(424587): a, c, g or t
  modified_base (425009)..(425009): a, c, g or t
  modified_base (430568)..(430568): a, c, g or t
  modified_base (431238)..(431238): a, c, g or t
  modified_base (431673)..(431674): a, c, g or t
  modified_base (431712)..(431712): a, c, g or t
  modified_base (431714)..(431715): a, c, g or t
  modified_base (431718)..(431718): a, c, g or t
  modified_base (431721)..(431722): a, c, g or t
  modified_base (431724)..(431733): a, c, g or t
  modified_base (431801)..(431812): a, c, g or t
  modified_base (431870)..(431871): a, c, g or t
  modified_base (431880)..(431881): a, c, g or t
  modified_base (433497)..(433500): a, c, g or t
  modified_base (435245)..(435273): a, c, g or t
  modified_base (436838)..(436839): a, c, g or t
  modified_base (437180)..(437188): a, c, g or t
  modified_base (437246)..(437246): a, c, g or t
  modified_base (437254)..(437254): a, c, g or t
  modified_base (444573)..(444574): a, c, g or t
  modified_base (445269)..(445272): a, c, g or t
  modified_base (446567)..(446567): a, c, g or t
  modified_base (446570)..(446570): a, c, g or t
  modified_base (448260)..(448260): a, c, g or t
  modified_base (452260)..(452260): a, c, g or t
  modified_base (453631)..(453633): a, c, g or t
  modified_base (455001)..(455002): a, c, g or t
  modified_base (456601)..(456602): a, c, g or t
  modified_base (456706)..(456709): a, c, g or t
  modified_base (457324)..(457325): a, c, g or t
  modified_base (459190)..(459192): a, c, g or t
  modified_base (459509)..(459510): a, c, g or t
  modified_base (459932)..(459933): a, c, g or t
  modified_base (459935)..(459935): a, c, g or t
  modified_base (460101)..(460101): a, c, g or t
  modified_base (460302)..(460302): a, c, g or t
  modified_base (461957)..(461958): a, c, g or t
  modified_base (463755)..(463755): a, c, g or t
  modified_base (464450)..(464450): a, c, g or t
  modified_base (469521)..(469528): a, c, g or t
  modified_base (469534)..(469534): a, c, g or t
  modified_base (470340)..(470343): a, c, g or t
  modified_base (473677)..(473677): a, c, g or t
  modified_base (475254)..(475256): a, c, g or t
  modified_base (480476)..(480476): a, c, g or t
  modified_base (482682)..(482682): a, c, g or t
  modified_base (483928)..(483928): a, c, g or t
  modified_base (483936)..(483936): a, c, g or t
  modified_base (484962)..(484962): a, c, g or t
  modified_base (485004)..(485004): a, c, g or t
  modified_base (486932)..(486938): a, c, g or t
  modified_base (486940)..(486940): a, c, g or t
  modified_base (486943)..(486944): a, c, g or t
  modified_base (486946)..(486946): a, c, g or t
  modified_base (487275)..(487284): a, c, g or t
  modified_base (488394)..(488394): a, c, g or t
  modified_base (489172)..(489178): a, c, g or t
  modified_base (489695)..(489698): a, c, g or t
  modified_base (494041)..(494041): a, c, g or t
  modified_base (495979)..(495986): a, c, g or t
  modified_base (497052)..(497052): a, c, g or t
  modified_base (498411)..(498411): a, c, g or t
  modified_base (502101)..(502101): a, c, g or t
  modified_base (504009)..(504020): a, c, g or t
  modified_base (504027)..(504027): a, c, g or t
  modified_base (504412)..(504412): a, c, g or t
  modified_base (506096)..(506096): a, c, g or t
  modified_base (507368)..(507373): a, c, g or t
  modified_base (514651)..(514651): a, c, g or t
  modified_base (515641)..(515641): a, c, g or t
  modified_base (517751)..(517751): a, c, g or t
  modified_base (521970)..(521970): a, c, g or t
  modified_base (523669)..(523672): a, c, g or t
  modified_base (524444)..(524444): a, c, g or t
  modified_base (528416)..(528418): a, c, g or t
  modified_base (528721)..(528724): a, c, g or t
  modified_base (530494)..(530494): a, c, g or t
  modified_base (540682)..(540685): a, c, g or t
  modified_base (543863)..(543864): a, c, g or t
  modified_base (555114)..(555114): a, c, g or t
  modified_base (557029)..(557029): a, c, g or t
  modified_base (559224)..(559224): a, c, g or t
  modified_base (560219)..(560223): a, c, g or t
  modified_base (565972)..(565972): a, c, g or t
  modified_base (567531)..(567531): a, c, g or t
  modified_base (568889)..(568889): a, c, g or t
  modified_base (571294)..(571294): a, c, g or t
  modified_base (573022)..(573028): a, c, g or t
  modified_base (574806)..(574806): a, c, g or t
  modified_base (578383)..(578383): a, c, g or t
  modified_base (581603)..(581603): a, c, g or t
  modified_base (581855)..(581868): a, c, g or t
  modified_base (585499)..(585503): a, c, g or t
  modified_base (585878)..(585887): a, c, g or t
  modified_base (586167)..(586167): a, c, g or t
  modified_base (586486)..(586489): a, c, g or t
  modified_base (589939)..(589939): a, c, g or t
  modified_base (591009)..(591009): a, c, g or t
  modified_base (591729)..(591729): a, c, g or t
  modified_base (591731)..(591743): a, c, g or t
  modified_base (591789)..(591792): a, c, g or t
  modified_base (592670)..(592670): a, c, g or t
  modified_base (592987)..(592987): a, c, g or t
  modified_base (594140)..(594140): a, c, g or t
  modified_base (594144)..(594148): a, c, g or t
  modified_base (594151)..(594152): a, c, g or t
  modified_base (594774)..(594774): a, c, g or t
  modified_base (595054)..(595054): a, c, g or t
  modified_base (595166)..(595166): a, c, g or t
  modified_base (595218)..(595218): a, c, g or t
  modified_base (595254)..(595254): a, c, g or t
  modified_base (595324)..(595324): a, c, g or t
  modified_base (595334)..(595334): a, c, g or t
  modified_base (595975)..(595978): a, c, g or t
  modified_base (598140)..(598141): a, c, g or t
  modified_base (598145)..(598153): a, c, g or t
  modified_base (602334)..(602334): a, c, g or t
  modified_base (604066)..(604067): a, c, g or t
  modified_base (606087)..(606088): a, c, g or t
  modified_base (606220)..(606225): a, c, g or t
  modified_base (607128)..(607128): a, c, g or t
  modified_base (609359)..(609359): a, c, g or t
  modified_base (611867)..(611867): a, c, g or t
  modified_base (615627)..(615642): a, c, g or t
  modified_base (615896)..(615897): a, c, g or t
  modified_base (616312)..(616312): a, c, g or t
  modified_base (618194)..(618194): a, c, g or t
  modified_base (618197)..(618198): a, c, g or t
  modified_base (618852)..(618855): a, c, g or t
  modified_base (619407)..(619407): a, c, g or t
  modified_base (620050)..(620050): a, c, g or t
  modified_base (620802)..(620803): a, c, g or t
  modified_base (622970)..(622974): a, c, g or t
  modified_base (624391)..(624391): a, c, g or t
  modified_base (625206)..(625209): a, c, g or t
  modified_base (625243)..(625246): a, c, g or t
  modified_base (625624)..(625627): a, c, g or t
  modified_base (627569)..(627569): a, c, g or t
  modified_base (628728)..(628728): a, c, g or t
  modified_base (628893)..(628893): a, c, g or t
  modified_base (628904)..(628904): a, c, g or t
  modified_base (630430)..(630433): a, c, g or t
  modified_base (630641)..(630641): a, c, g or t
  modified_base (632319)..(632319): a, c, g or t
  modified_base (632635)..(632635): a, c, g or t
  modified_base (634307)..(634307): a, c, g or t
  modified_base (634905)..(634905): a, c, g or t
  modified_base (634993)..(634993): a, c, g or t
  modified_base (636256)..(636259): a, c, g or t
  modified_base (636263)..(636264): a, c, g or t
  modified_base (636570)..(636580): a, c, g or t
  modified_base (637768)..(637768): a, c, g or t
  modified_base (637770)..(637777): a, c, g or t
  modified_base (638422)..(638425): a, c, g or t
  modified_base (639556)..(639569): a, c, g or t
  modified_base (641807)..(641807): a, c, g or t
  modified_base (641810)..(641811): a, c, g or t
  modified_base (644698)..(644698): a, c, g or t
  modified_base (648241)..(648241): a, c, g or t
  modified_base (648323)..(648323): a, c, g or t
  modified_base (648358)..(648358): a, c, g or t
  modified_base (649192)..(649192): a, c, g or t
  modified_base (649276)..(649276): a, c, g or t
  modified_base (650148)..(650151): a, c, g or t
  modified_base (650810)..(650813): a, c, g or t
  modified_base (650815)..(650816): a, c, g or t
  modified_base (651982)..(651995): a, c, g or t
  modified_base (652939)..(652939): a, c, g or t
  modified_base (653523)..(653538): a, c, g or t
  modified_base (654889)..(654889): a, c, g or t
  modified_base (654895)..(654898): a, c, g or t
  modified_base (655053)..(655054): a, c, g or t
  modified_base (655058)..(655066): a, c, g or t
  modified_base (655293)..(655297): a, c, g or t
  modified_base (655963)..(655963): a, c, g or t
  modified_base (656001)..(656012): a, c, g or t
  modified_base (656274)..(656277): a, c, g or t
  modified_base (657455)..(657458): a, c, g or t
  modified_base (657644)..(657646): a, c, g or t
  modified_base (657672)..(657673): a, c, g or t
  modified_base (658009)..(658009): a, c, g or t
  modified_base (658954)..(658955): a, c, g or t
  modified_base (661722)..(661722): a, c, g or t
  modified_base (662186)..(662188): a, c, g or t
  modified_base (662382)..(662382): a, c, g or t
  modified_base (664782)..(664782): a, c, g or t
  modified_base (664787)..(664798): a, c, g or t
  modified_base (665007)..(665007): a, c, g or t
  modified_base (665605)..(665605): a, c, g or t
  modified_base (665609)..(665610): a, c, g or t
  modified_base (665613)..(665618): a, c, g or t
  modified_base (666834)..(666835): a, c, g or t
  modified_base (667553)..(667554): a, c, g or t
  modified_base (668391)..(668394): a, c, g or t
  modified_base (669377)..(669378): a, c, g or t
  modified_base (669393)..(669394): a, c, g or t
  modified_base (669397)..(669397): a, c, g or t
  modified_base (669406)..(669406): a, c, g or t
  modified_base (669408)..(669446): a, c, g or t
  modified_base (670969)..(670969): a, c, g or t
  modified_base (671334)..(671338): a, c, g or t
  modified_base (672185)..(672185): a, c, g or t
  modified_base (673146)..(673150): a, c, g or t
  modified_base (676592)..(676592): a, c, g or t
  modified_base (678104)..(678104): a, c, g or t
  modified_base (685061)..(685061): a, c, g or t
  modified_base (687870)..(687870): a, c, g or t
  modified_base (688026)..(688026): a, c, g or t
  modified_base (688992)..(688992): a, c, g or t
  modified_base (689540)..(689541): a, c, g or t
  modified_base (692530)..(692530): a, c, g or t
  modified_base (692916)..(692916): a, c, g or t
  modified_base (693132)..(693132): a, c, g or t
  modified_base (695933)..(695933): a, c, g or t
  modified_base (696026)..(696031): a, c, g or t
  modified_base (696868)..(696870): a, c, g or t
  modified_base (698237)..(698237): a, c, g or t
  modified_base (698861)..(698862): a, c, g or t
  modified_base (698865)..(698865): a, c, g or t
  modified_base (698868)..(698869): a, c, g or t
  modified_base (703581)..(703581): a, c, g or t
  modified_base (703633)..(703633): a, c, g or t
  modified_base (703641)..(703641): a, c, g or t
  modified_base (704656)..(704656): a, c, g or t
  modified_base (704988)..(704988): a, c, g or t
  modified_base (706436)..(706436): a, c, g or t
  modified_base (706919)..(706919): a, c, g or t
  modified_base (707074)..(707074): a, c, g or t
  modified_base (707216)..(707216): a, c, g or t
  modified_base (707664)..(707664): a, c, g or t
  modified_base (712776)..(712776): a, c, g or t
  modified_base (714460)..(714464): a, c, g or t
  modified_base (714466)..(714469): a, c, g or t
  modified_base (716160)..(716160): a, c, g or t
  modified_base (716331)..(716331): a, c, g or t
  modified_base (717687)..(717687): a, c, g or t
  modified_base (720996)..(720996): a, c, g or t
  modified_base (721561)..(721565): a, c, g or t
  modified_base (724948)..(724948): a, c, g or t
  modified_base (725529)..(725529): a, c, g or t
  modified_base (727886)..(727886): a, c, g or t
  modified_base (729811)..(729811): a, c, g or t
  modified_base (729953)..(729953): a, c, g or t
  modified_base (732245)..(732248): a, c, g or t
  modified_base (733889)..(733889): a, c, g or t
  modified_base (734891)..(734891): a, c, g or t
  modified_base (734893)..(734897): a, c, g or t
  modified_base (736497)..(736500): a, c, g or t
  modified_base (737741)..(737741): a, c, g or t
  modified_base (738483)..(738483): a, c, g or t
  modified_base (738493)..(738493): a, c, g or t
  modified_base (738645)..(738645): a, c, g or t
  modified_base (738649)..(738649): a, c, g or t
  modified_base (739403)..(739403): a, c, g or t
  modified_base (739679)..(739679): a, c, g or t
  modified_base (739781)..(739781): a, c, g or t
  modified_base (741596)..(741613): a, c, g or t
  modified_base (744800)..(744800): a, c, g or t
  modified_base (747734)..(747734): a, c, g or t
  modified_base (748099)..(748099): a, c, g or t
  modified_base (748556)..(748556): a, c, g or t
  modified_base (748786)..(748790): a, c, g or t
  modified_base (749604)..(749604): a, c, g or t
  modified_base (750083)..(750083): a, c, g or t
  modified_base (753691)..(753691): a, c, g or t
  modified_base (754752)..(754753): a, c, g or t
  modified_base (756485)..(756485): a, c, g or t
  modified_base (756509)..(756509): a, c, g or t
  modified_base (758574)..(758574): a, c, g or t
  modified_base (759574)..(759574): a, c, g or t
  modified_base (759635)..(759635): a, c, g or t
  modified_base (759745)..(759745): a, c, g or t
  modified_base (762972)..(762972): a, c, g or t
  modified_base (765086)..(765086): a, c, g or t
  modified_base (765946)..(765946): a, c, g or t
  modified_base (766395)..(766395): a, c, g or t
  modified_base (766496)..(766496): a, c, g or t
  modified_base (768974)..(768977): a, c, g or t
  modified_base (772823)..(772823): a, c, g or t
  modified_base (774934)..(774934): a, c, g or t
  modified_base (775088)..(775088): a, c, g or t
  modified_base (775370)..(775370): a, c, g or t
  modified_base (775413)..(775417): a, c, g or t
  modified_base (775421)..(775421): a, c, g or t
  modified_base (775450)..(775456): a, c, g or t
  modified_base (775565)..(775566): a, c, g or t
  modified_base (776410)..(776410): a, c, g or t
  modified_base (778006)..(778006): a, c, g or t
  modified_base (778357)..(778360): a, c, g or t
  modified_base (781879)..(781879): a, c, g or t
  modified_base (782104)..(782104): a, c, g or t
  modified_base (782655)..(782655): a, c, g or t
  modified_base (783775)..(783775): a, c, g or t
  modified_base (783964)..(783964): a, c, g or t
  modified_base (784224)..(784224): a, c, g or t
  modified_base (786859)..(786867): a, c, g or t
  modified_base (789515)..(789518): a, c, g or t
  modified_base (789986)..(789989): a, c, g or t
  modified_base (792286)..(792291): a, c, g or t
  modified_base (793619)..(793619): a, c, g or t
  modified_base (796438)..(796438): a, c, g or t
  modified_base (796795)..(796795): a, c, g or t
  modified_base (797231)..(797234): a, c, g or t
  modified_base (798647)..(798650): a, c, g or t
  modified_base (798933)..(798933): a, c, g or t
  modified_base (800264)..(800264): a, c, g or t
  modified_base (803326)..(803329): a, c, g or t
  modified_base (805000)..(805000): a, c, g or t
  modified_base (805165)..(805165): a, c, g or t
  modified_base (806646)..(806647): a, c, g or t
  modified_base (806925)..(806926): a, c, g or t
  modified_base (807398)..(807398): a, c, g or t
  modified_base (808012)..(808012): a, c, g or t
  modified_base (808457)..(808457): a, c, g or t
  modified_base (808743)..(808743): a, c, g or t
  modified_base (809143)..(809143): a, c, g or t
  modified_base (809317)..(809318): a, c, g or t
  modified_base (809324)..(809325): a, c, g or t
  modified_base (810065)..(810066): a, c, g or t
  modified_base (810263)..(810269): a, c, g or t
  modified_base (812205)..(812205): a, c, g or t
  modified_base (812207)..(812211): a, c, g or t
  modified_base (812626)..(812626): a, c, g or t
  modified_base (815916)..(815916): a, c, g or t
  modified_base (816475)..(816485): a, c, g or t
  modified_base (816783)..(816783): a, c, g or t
  modified_base (816905)..(816905): a, c, g or t
  modified_base (817309)..(817309): a, c, g or t
  modified_base (818866)..(818866): a, c, g or t
  modified_base (819806)..(819806): a, c, g or t
  modified_base (821727)..(821727): a, c, g or t
  modified_base (824406)..(824412): a, c, g or t
  modified_base (825699)..(825699): a, c, g or t
  modified_base (828358)..(828358): a, c, g or t
  modified_base (828360)..(828363): a, c, g or t
  modified_base (828589)..(828589): a, c, g or t
  modified_base (828620)..(828624): a, c, g or t
  modified_base (829872)..(829872): a, c, g or t
  modified_base (832150)..(832155): a, c, g or t
  modified_base (834164)..(834164): a, c, g or t
  modified_base (834471)..(834471): a, c, g or t
  modified_base (834488)..(834488): a, c, g or t
  modified_base (834768)..(834769): a, c, g or t
  modified_base (835920)..(835930): a, c, g or t
  modified_base (836912)..(836912): a, c, g or t
  modified_base (837829)..(837830): a, c, g or t
  modified_base (837832)..(837834): a, c, g or t
  modified_base (841466)..(841468): a, c, g or t
  modified_base (841471)..(841472): a, c, g or t
  modified_base (842227)..(842227): a, c, g or t
  modified_base (842483)..(842483): a, c, g or t
  modified_base (843022)..(843023): a, c, g or t
  modified_base (843025)..(843040): a, c, g or t
  modified_base (843501)..(843501): a, c, g or t
  modified_base (843650)..(843653): a, c, g or t
  modified_base (843657)..(843657): a, c, g or t
  modified_base (846672)..(846675): a, c, g or t
  modified_base (850455)..(850458): a, c, g or t
  modified_base (850856)..(850856): a, c, g or t
  modified_base (851412)..(851421): a, c, g or t
  modified_base (852163)..(852166): a, c, g or t
  modified_base (853229)..(853232): a, c, g or t
  modified_base (861080)..(861080): a, c, g or t
  modified_base (863145)..(863145): a, c, g or t
  modified_base (863808)..(863811): a, c, g or t
  modified_base (863975)..(863976): a, c, g or t
  modified_base (863979)..(864005): a, c, g or t
  modified_base (864110)..(864121): a, c, g or t
  modified_base (864124)..(864124): a, c, g or t
  modified_base (864190)..(864212): a, c, g or t
  modified_base (868882)..(868882): a, c, g or t
  modified_base (868885)..(868885): a, c, g or t
  modified_base (869349)..(869349): a, c, g or t
  modified_base (871041)..(871041): a, c, g or t
  modified_base (872598)..(872598): a, c, g or t
  modified_base (872619)..(872619): a, c, g or t
  modified_base (872849)..(872849): a, c, g or t
  modified_base (873366)..(873368): a, c, g or t
  modified_base (873567)..(873568): a, c, g or t
  modified_base (873571)..(873574): a, c, g or t
  modified_base (873753)..(873753): a, c, g or t
  modified_base (874317)..(874323): a, c, g or t
  modified_base (874327)..(874327): a, c, g or t
  modified_base (874334)..(874335): a, c, g or t
  modified_base (874893)..(874893): a, c, g or t
  modified_base (877050)..(877050): a, c, g or t
  modified_base (881463)..(881463): a, c, g or t
  modified_base (884510)..(884515): a, c, g or t
  modified_base (885137)..(885137): a, c, g or t
  modified_base (886228)..(886231): a, c, g or t
  modified_base (886444)..(886451): a, c, g or t
  modified_base (888634)..(888634): a, c, g or t
  modified_base (889772)..(889772): a, c, g or t
  modified_base (890749)..(890752): a, c, g or t
  modified_base (890981)..(890981): a, c, g or t
  modified_base (891705)..(891706): a, c, g or t
  modified_base (891734)..(891740): a, c, g or t
  modified_base (891742)..(891743): a, c, g or t
  modified_base (891797)..(891797): a, c, g or t
  modified_base (892712)..(892712): a, c, g or t
  modified_base (894384)..(894384): a, c, g or t
  modified_base (894386)..(894397): a, c, g or t
  modified_base (894604)..(894604): a, c, g or t
  modified_base (894700)..(894701): a, c, g or t
  modified_base (894798)..(894799): a, c, g or t
  modified_base (894802)..(894807): a, c, g or t
  modified_base (895829)..(895830): a, c, g or t
  modified_base (895851)..(895854): a, c, g or t
  modified_base (895924)..(895927): a, c, g or t
  modified_base (895946)..(895950): a, c, g or t
  modified_base (896038)..(896038): a, c, g or t
  modified_base (896655)..(896659): a, c, g or t
  modified_base (896683)..(896689): a, c, g or t
  modified_base (896692)..(896692): a, c, g or t
  modified_base (897752)..(897755): a, c, g or t
  modified_base (897826)..(897837): a, c, g or t
  modified_base (897897)..(897897): a, c, g or t
  modified_base (898829)..(898832): a, c, g or t
  modified_base (900978)..(900978): a, c, g or t
  modified_base (901496)..(901496): a, c, g or t
  modified_base (901769)..(901769): a, c, g or t
  modified_base (902140)..(902140): a, c, g or t
  modified_base (902233)..(902233): a, c, g or t
  modified_base (907744)..(907744): a, c, g or t
  modified_base (907780)..(907780): a, c, g or t
  modified_base (909640)..(909640): a, c, g or t
  modified_base (915001)..(915001): a, c, g or t
  modified_base (915169)..(915169): a, c, g or t
  modified_base (915482)..(915482): a, c, g or t
  modified_base (915516)..(915516): a, c, g or t
  modified_base (915534)..(915534): a, c, g or t
  modified_base (915549)..(915549): a, c, g or t
  modified_base (915551)..(915551): a, c, g or t
  modified_base (915582)..(915582): a, c, g or t
  modified_base (915595)..(915595): a, c, g or t
  modified_base (915710)..(915710): a, c, g or t
  modified_base (915867)..(915867): a, c, g or t
  modified_base (915873)..(915873): a, c, g or t
  modified_base (915900)..(915900): a, c, g or t
  modified_base (915933)..(915933): a, c, g or t
  modified_base (915972)..(915972): a, c, g or t
  modified_base (915999)..(915999): a, c, g or t
  modified_base (916139)..(916139): a, c, g or t
  modified_base (916146)..(916146): a, c, g or t
  modified_base (916178)..(916178): a, c, g or t
  modified_base (916273)..(916273): a, c, g or t
  modified_base (916310)..(916314): a, c, g or t
  modified_base (916442)..(916442): a, c, g or t
  modified_base (916559)..(916559): a, c, g or t
  modified_base (916718)..(916718): a, c, g or t
  modified_base (917004)..(917008): a, c, g or t
  modified_base (917270)..(917270): a, c, g or t
  modified_base (917328)..(917328): a, c, g or t
  modified_base (917364)..(917364): a, c, g or t
  modified_base (917433)..(917433): a, c, g or t
  modified_base (917477)..(917477): a, c, g or t
  modified_base (917881)..(917881): a, c, g or t
  modified_base (918103)..(918116): a, c, g or t
  modified_base (918131)..(918131): a, c, g or t
  modified_base (918325)..(918325): a, c, g or t
  modified_base (918370)..(918370): a, c, g or t
  modified_base (918468)..(918468): a, c, g or t
  modified_base (918639)..(918639): a, c, g or t
  modified_base (918714)..(918714): a, c, g or t
  modified_base (918894)..(918894): a, c, g or t
  modified_base (919608)..(919608): a, c, g or t
  modified_base (919686)..(919686): a, c, g or t
  modified_base (919842)..(919842): a, c, g or t
  modified_base (919893)..(919893): a, c, g or t
  modified_base (919926)..(919926): a, c, g or t
  modified_base (919935)..(919935): a, c, g or t
  modified_base (919954)..(919954): a, c, g or t
  modified_base (919968)..(919968): a, c, g or t
  modified_base (920001)..(920001): a, c, g or t
  modified_base (920157)..(920157): a, c, g or t
  modified_base (920256)..(920256): a, c, g or t
  modified_base (920418)..(920418): a, c, g or t
  modified_base (920466)..(920466): a, c, g or t
  modified_base (920508)..(920508): a, c, g or t
  modified_base (920544)..(920544): a, c, g or t
  modified_base (920639)..(920639): a, c, g or t
  modified_base (920676)..(920676): a, c, g or t
  modified_base (920691)..(920691): a, c, g or t
  modified_base (920757)..(920757): a, c, g or t
  modified_base (920883)..(920883): a, c, g or t
  modified_base (920901)..(920901): a, c, g or t
  modified_base (920938)..(920957): a, c, g or t
  modified_base (920968)..(920968): a, c, g or t
  modified_base (920998)..(920998): a, c, g or t
  modified_base (921025)..(921025): a, c, g or t
  modified_base (921036)..(921036): a, c, g or t
  modified_base (921055)..(921055): a, c, g or t
  modified_base (921076)..(921076): a, c, g or t
  modified_base (921079)..(921079): a, c, g or t
  modified_base (921231)..(921231): a, c, g or t
  modified_base (921244)..(921244): a, c, g or t
  modified_base (921249)..(921249): a, c, g or t
  modified_base (921280)..(921280): a, c, g or t
  modified_base (921295)..(921295): a, c, g or t
  modified_base (921313)..(921313): a, c, g or t
  modified_base (921332)..(921332): a, c, g or t
  modified_base (921358)..(921358): a, c, g or t
  modified_base (921370)..(921374): a, c, g or t
  modified_base (921409)..(921409): a, c, g or t
  modified_base (921460)..(921460): a, c, g or t
  modified_base (921515)..(921515): a, c, g or t
  modified_base (921529)..(921529): a, c, g or t
  modified_base (921569)..(921572): a, c, g or t
  modified_base (921574)..(921574): a, c, g or t
  modified_base (921590)..(921590): a, c, g or t
  modified_base (921630)..(921630): a, c, g or t
  modified_base (921734)..(921734): a, c, g or t
  modified_base (921759)..(921759): a, c, g or t
  modified_base (921777)..(921777): a, c, g or t
  modified_base (921798)..(921798): a, c, g or t
  modified_base (921804)..(921804): a, c, g or t
  modified_base (921846)..(921846): a, c, g or t
  modified_base (921865)..(921865): a, c, g or t
  modified_base (921888)..(921888): a, c, g or t
  modified_base (921945)..(921945): a, c, g or t
  modified_base (921951)..(921951): a, c, g or t
  modified_base (922020)..(922020): a, c, g or t
  modified_base (922029)..(922029): a, c, g or t
  modified_base (922074)..(922074): a, c, g or t
  modified_base (922101)..(922101): a, c, g or t
  modified_base (922143)..(922143): a, c, g or t
  modified_base (922150)..(922150): a, c, g or t
  modified_base (922161)..(922161): a, c, g or t
  modified_base (922211)..(922211): a, c, g or t
  modified_base (922478)..(922482): a, c, g or t
  modified_base (922855)..(922855): a, c, g or t
  modified_base (922878)..(922878): a, c, g or t
  modified_base (922893)..(922893): a, c, g or t
  modified_base (922911)..(922911): a, c, g or t
  modified_base (922944)..(922944): a, c, g or t
  modified_base (923053)..(923053): a, c, g or t
  modified_base (923065)..(923065): a, c, g or t
  modified_base (923086)..(923086): a, c, g or t
  modified_base (923103)..(923103): a, c, g or t
  modified_base (923116)..(923116): a, c, g or t
  modified_base (923399)..(923399): a, c, g or t
  modified_base (923865)..(923865): a, c, g or t
  modified_base (923959)..(923959): a, c, g or t
  modified_base (924475)..(924478): a, c, g or t
  modified_base (925758)..(925758): a, c, g or t
  modified_base (925813)..(925822): a, c, g or t
  modified_base (925883)..(925884): a, c, g or t
  modified_base (927996)..(927996): a, c, g or t
  modified_base (928525)..(928525): a, c, g or t
  modified_base (929150)..(929152): a, c, g or t
  modified_base (929259)..(929259): a, c, g or t
  modified_base (929381)..(929381): a, c, g or t
  modified_base (930866)..(930866): a, c, g or t
  modified_base (932591)..(932591): a, c, g or t
  modified_base (933298)..(933298): a, c, g or t
  modified_base (933398)..(933398): a, c, g or t
  modified_base (934127)..(934131): a, c, g or t
  modified_base (934882)..(934882): a, c, g or t
  modified_base (935711)..(935711): a, c, g or t
  modified_base (936816)..(936816): a, c, g or t
  modified_base (937188)..(937188): a, c, g or t
  modified_base (937828)..(937828): a, c, g or t
  modified_base (937831)..(937837): a, c, g or t
  modified_base (938075)..(938075): a, c, g or t
  modified_base (939309)..(939309): a, c, g or t
  modified_base (939576)..(939576): a, c, g or t
  modified_base (939789)..(939790): a, c, g or t
  modified_base (941899)..(941915): a, c, g or t
  modified_base (942548)..(942548): a, c, g or t
  modified_base (942867)..(942867): a, c, g or t
  modified_base (945049)..(945049): a, c, g or t
  modified_base (946500)..(946500): a, c, g or t
  modified_base (947875)..(947875): a, c, g or t
  modified_base (949557)..(949557): a, c, g or t
  modified_base (950797)..(950797): a, c, g or t
  modified_base (951058)..(951058): a, c, g or t
  modified_base (954776)..(954776): a, c, g or t
  modified_base (955727)..(955727): a, c, g or t
  modified_base (956314)..(956314): a, c, g or t
  modified_base (956697)..(956700): a, c, g or t
  modified_base (957261)..(957261): a, c, g or t
  modified_base (958518)..(958522): a, c, g or t
  modified_base (959483)..(959486): a, c, g or t
  modified_base (960426)..(960431): a, c, g or t
  modified_base (960450)..(960450): a, c, g or t
  modified_base (960728)..(960731): a, c, g or t
  modified_base (960975)..(960978): a, c, g or t
  modified_base (961938)..(961938): a, c, g or t
  modified_base (962224)..(962227): a, c, g or t
  modified_base (963321)..(963321): a, c, g or t
  modified_base (965180)..(965181): a, c, g or t
  modified_base (965403)..(965403): a, c, g or t
  modified_base (966555)..(966555): a, c, g or t
  modified_base (969219)..(969219): a, c, g or t
  modified_base (969470)..(969470): a, c, g or t
  modified_base (970344)..(970349): a, c, g or t
  modified_base (973378)..(973378): a, c, g or t
  modified_base (974137)..(974137): a, c, g or t
  modified_base (975586)..(975586): a, c, g or t
  modified_base (976157)..(976157): a, c, g or t
  modified_base (977112)..(977112): a, c, g or t
  modified_base (978930)..(978930): a, c, g or t
  modified_base (978939)..(978939): a, c, g or t
  modified_base (979913)..(979914): a, c, g or t
  modified_base (982178)..(982181): a, c, g or t
  modified_base (983609)..(983612): a, c, g or t
  modified_base (986099)..(986099): a, c, g or t
  modified_base (986904)..(986904): a, c, g or t
  modified_base (987285)..(987285): a, c, g or t
  modified_base (988488)..(988489): a, c, g or t
  modified_base (988491)..(988499): a, c, g or t
  modified_base (988503)..(988503): a, c, g or t
  modified_base (989005)..(989005): a, c, g or t
  modified_base (991164)..(991164): a, c, g or t
  modified_base (995958)..(995958): a, c, g or t
  modified_base (996009)..(996009): a, c, g or t
  modified_base (996437)..(996440): a, c, g or t
  modified_base (999302)..(999302): a, c, g or t
  modified_base (1003420)..(1003429): a, c, g or t
  modified_base (1003739)..(1003739): a, c, g or t
  modified_base (1006777)..(1006777): a, c, g or t
  modified_base (1009336)..(1009342): a, c, g or t
  modified_base (1010551)..(1010556): a, c, g or t
  modified_base (1010823)..(1010823): a, c, g or t
  modified_base (1012017)..(1012017): a, c, g or t
  modified_base (1016473)..(1016473): a, c, g or t
  modified_base (1016539)..(1016539): a, c, g or t
  modified_base (1016737)..(1016737): a, c, g or t
  modified_base (1016968)..(1016968): a, c, g or t
  modified_base (1017076)..(1017076): a, c, g or t
  modified_base (1017122)..(1017122): a, c, g or t
  modified_base (1017124)..(1017124): a, c, g or t
  modified_base (1017130)..(1017130): a, c, g or t
  modified_base (1022144)..(1022147): a, c, g or t
  modified_base (1025444)..(1025444): a, c, g or t
  modified_base (1026003)..(1026008): a, c, g or t
  modified_base (1031209)..(1031209): a, c, g or t
  modified_base (1031345)..(1031345): a, c, g or t
  modified_base (1031446)..(1031446): a, c, g or t
  modified_base (1032177)..(1032178): a, c, g or t
  modified_base (1032451)..(1032459): a, c, g or t
  modified_base (1033020)..(1033021): a, c, g or t
  modified_base (1033070)..(1033074): a, c, g or t
  modified_base (1033581)..(1033586): a, c, g or t
  modified_base (1034691)..(1034691): a, c, g or t
  modified_base (1035565)..(1035565): a, c, g or t
  modified_base (1036266)..(1036266): a, c, g or t
  modified_base (1036577)..(1036577): a, c, g or t
  modified_base (1037803)..(1037806): a, c, g or t
  modified_base (1038992)..(1038992): a, c, g or t
  modified_base (1040300)..(1040300): a, c, g or t
  modified_base (1040814)..(1040814): a, c, g or t
  modified_base (1044952)..(1044953): a, c, g or t
  modified_base (1044960)..(1044961): a, c, g or t
  modified_base (1047829)..(1047829): a, c, g or t
  modified_base (1050452)..(1050455): a, c, g or t
  modified_base (1053904)..(1053909): a, c, g or t
  modified_base (1053911)..(1053911): a, c, g or t
  modified_base (1055611)..(1055611): a, c, g or t
  modified_base (1056878)..(1056878): a, c, g or t
  modified_base (1060098)..(1060103): a, c, g or t
  modified_base (1060445)..(1060445): a, c, g or t
  modified_base (1062288)..(1062288): a, c, g or t
  modified_base (1063809)..(1063809): a, c, g or t
  modified_base (1064535)..(1064535): a, c, g or t
  modified_base (1066852)..(1066852): a, c, g or t
  modified_base (1067949)..(1067949): a, c, g or t
  modified_base (1068510)..(1068510): a, c, g or t
  modified_base (1068584)..(1068584): a, c, g or t
  modified_base (1068939)..(1068939): a, c, g or t
  modified_base (1069378)..(1069378): a, c, g or t
  modified_base (1071920)..(1071920): a, c, g or t
  modified_base (1075063)..(1075063): a, c, g or t
  modified_base (1080091)..(1080091): a, c, g or t
  modified_base (1080093)..(1080096): a, c, g or t
  modified_base (1083035)..(1083084): a, c, g or t
  modified_base (1084929)..(1084929): a, c, g or t
  modified_base (1085653)..(1085653): a, c, g or t
  modified_base (1086353)..(1086357): a, c, g or t
  modified_base (1089525)..(1089525): a, c, g or t
  modified_base (1090976)..(1090976): a, c, g or t
  modified_base (1093558)..(1093558): a, c, g or t
  modified_base (1097544)..(1097547): a, c, g or t
  modified_base (1102472)..(1102472): a, c, g or t
  modified_base (1103016)..(1103016): a, c, g or t
  modified_base (1103200)..(1103200): a, c, g or t
  modified_base (1103543)..(1103543): a, c, g or t
  modified_base (1105460)..(1105460): a, c, g or t
  modified_base (1105999)..(1106000): a, c, g or t
  modified_base (1106004)..(1106004): a, c, g or t
  modified_base (1107794)..(1107794): a, c, g or t
  modified_base (1110654)..(1110654): a, c, g or t
  modified_base (1111576)..(1111576): a, c, g or t
  modified_base (1114665)..(1114665): a, c, g or t
  modified_base (1117446)..(1117446): a, c, g or t
  modified_base (1120075)..(1120075): a, c, g or t
  modified_base (1121170)..(1121170): a, c, g or t
  modified_base (1122383)..(1122383): a, c, g or t
  modified_base (1123377)..(1123377): a, c, g or t
  modified_base (1123396)..(1123396): a, c, g or t
  modified_base (1124474)..(1124474): a, c, g or t
  modified_base (1124561)..(1124561): a, c, g or t
  modified_base (1124714)..(1124714): a, c, g or t
  modified_base (1125765)..(1125765): a, c, g or t
  modified_base (1125940)..(1125941): a, c, g or t
  modified_base (1126001)..(1126013): a, c, g or t
  modified_base (1126016)..(1126016): a, c, g or t
  modified_base (1127069)..(1127069): a, c, g or t
  modified_base (1127072)..(1127072): a, c, g or t
  modified_base (1131327)..(1131327): a, c, g or t
  modified_base (1132190)..(1132190): a, c, g or t
  modified_base (1133092)..(1133092): a, c, g or t
  modified_base (1134903)..(1134906): a, c, g or t
  modified_base (1137457)..(1137457): a, c, g or t
  modified_base (1138730)..(1138730): a, c, g or t
  modified_base (1139343)..(1139343): a, c, g or t
  modified_base (1139406)..(1139406): a, c, g or t
  modified_base (1144183)..(1144187): a, c, g or t
  modified_base (1144189)..(1144189): a, c, g or t
  modified_base (1148610)..(1148610): a, c, g or t
  modified_base (1148732)..(1148732): a, c, g or t
  modified_base (1150787)..(1150787): a, c, g or t
  modified_base (1151076)..(1151076): a, c, g or t
  modified_base (1155711)..(1155711): a, c, g or t
  modified_base (1156372)..(1156380): a, c, g or t
  modified_base (1156383)..(1156386): a, c, g or t
  modified_base (1156633)..(1156633): a, c, g or t
  modified_base (1159489)..(1159489): a, c, g or t
  modified_base (1163078)..(1163078): a, c, g or t
  modified_base (1165021)..(1165021): a, c, g or t
  modified_base (1173496)..(1173496): a, c, g or t
  modified_base (1174240)..(1174240): a, c, g or t
  modified_base (1175553)..(1175553): a, c, g or t
  modified_base (1178760)..(1178761): a, c, g or t
  modified_base (1178763)..(1178774): a, c, g or t
  modified_base (1179177)..(1179177): a, c, g or t
  modified_base (1179189)..(1179189): a, c, g or t
  modified_base (1179246)..(1179246): a, c, g or t
  modified_base (1180763)..(1180763): a, c, g or t
  modified_base (1182048)..(1182051): a, c, g or t
  modified_base (1186774)..(1186774): a, c, g or t
  modified_base (1186912)..(1186912): a, c, g or t
  modified_base (1187369)..(1187369): a, c, g or t
  modified_base (1187450)..(1187450): a, c, g or t
  modified_base (1189068)..(1189068): a, c, g or t
  modified_base (1189081)..(1189081): a, c, g or t
  modified_base (1190239)..(1190239): a, c, g or t
  modified_base (1190253)..(1190253): a, c, g or t
  modified_base (1191509)..(1191509): a, c, g or t
  modified_base (1191578)..(1191580): a, c, g or t
  modified_base (1191649)..(1191649): a, c, g or t
  modified_base (1191869)..(1191869): a, c, g or t
  modified_base (1192426)..(1192427): a, c, g or t
  modified_base (1192777)..(1192777): a, c, g or t
  modified_base (1193249)..(1193249): a, c, g or t
  modified_base (1194491)..(1194491): a, c, g or t
  modified_base (1194740)..(1194744): a, c, g or t
  modified_base (1194919)..(1194919): a, c, g or t
  modified_base (1195015)..(1195015): a, c, g or t
  modified_base (1195355)..(1195364): a, c, g or t
  modified_base (1195822)..(1195823): a, c, g or t
  modified_base (1196885)..(1196885): a, c, g or t
  modified_base (1197187)..(1197187): a, c, g or t
  modified_base (1197593)..(1197599): a, c, g or t
  modified_base (1198717)..(1198720): a, c, g or t
  modified_base (1198722)..(1198725): a, c, g or t
  modified_base (1200623)..(1200624): a, c, g or t
  modified_base (1201300)..(1201300): a, c, g or t
  modified_base (1201514)..(1201514): a, c, g or t
  modified_base (1201943)..(1201943): a, c, g or t
  modified_base (1204880)..(1204883): a, c, g or t
  modified_base (1205697)..(1205697): a, c, g or t
  modified_base (1209601)..(1209603): a, c, g or t
  modified_base (1212677)..(1212688): a, c, g or t
  modified_base (1214777)..(1214777): a, c, g or t
  modified_base (1217715)..(1217715): a, c, g or t
  modified_base (1217717)..(1217718): a, c, g or t
  modified_base (1220813)..(1220813): a, c, g or t
  modified_base (1221486)..(1221486): a, c, g or t
  modified_base (1221498)..(1221498): a, c, g or t
  modified_base (1222736)..(1222736): a, c, g or t
  modified_base (1223145)..(1223153): a, c, g or t
  modified_base (1223332)..(1223333): a, c, g or t
  modified_base (1225505)..(1225508): a, c, g or t
  modified_base (1225751)..(1225758): a, c, g or t
  modified_base (1225994)..(1225994): a, c, g or t
  modified_base (1226822)..(1226822): a, c, g or t
  modified_base (1227354)..(1227354): a, c, g or t
  modified_base (1230479)..(1230479): a, c, g or t
  modified_base (1232941)..(1232941): a, c, g or t
  modified_base (1234685)..(1234685): a, c, g or t
  modified_base (1235401)..(1235401): a, c, g or t
  modified_base (1235544)..(1235544): a, c, g or t
  modified_base (1235725)..(1235725): a, c, g or t
  modified_base (1235956)..(1235956): a, c, g or t
  modified_base (1239293)..(1239293): a, c, g or t
  modified_base (1240389)..(1240392): a, c, g or t
  modified_base (1241637)..(1241641): a, c, g or t
  modified_base (1244943)..(1244943): a, c, g or t
  modified_base (1244946)..(1244946): a, c, g or t
  modified_base (1245437)..(1245440): a, c, g or t
  modified_base (1248174)..(1248174): a, c, g or t
  modified_base (1248927)..(1248933): a, c, g or t
  modified_base (1249024)..(1249024): a, c, g or t
  modified_base (1251434)..(1251440): a, c, g or t
  modified_base (1252691)..(1252700): a, c, g or t
  modified_base (1252710)..(1252710): a, c, g or t
  modified_base (1253386)..(1253386): a, c, g or t
  modified_base (1253699)..(1253706): a, c, g or t
  modified_base (1253766)..(1253767): a, c, g or t
  modified_base (1254559)..(1254559): a, c, g or t
  modified_base (1256167)..(1256170): a, c, g or t
  modified_base (1257047)..(1257086): a, c, g or t
  modified_base (1259262)..(1259262): a, c, g or t
  modified_base (1259568)..(1259568): a, c, g or t
  modified_base (1260189)..(1260189): a, c, g or t
  modified_base (1261350)..(1261368): a, c, g or t
  modified_base (1262871)..(1262877): a, c, g or t
  modified_base (1262880)..(1262881): a, c, g or t
  modified_base (1263806)..(1263809): a, c, g or t
  modified_base (1266620)..(1266620): a, c, g or t
  modified_base (1267311)..(1267311): a, c, g or t
  modified_base (1268258)..(1268258): a, c, g or t
  modified_base (1268464)..(1268464): a, c, g or t
  modified_base (1271576)..(1271576): a, c, g or t
  modified_base (1272316)..(1272316): a, c, g or t
  modified_base (1276048)..(1276048): a, c, g or t
  modified_base (1278490)..(1278491): a, c, g or t
  modified_base (1278494)..(1278498): a, c, g or t
  modified_base (1280404)..(1280404): a, c, g or t
  modified_base (1281488)..(1281488): a, c, g or t
  modified_base (1281490)..(1281493): a, c, g or t
  modified_base (1282046)..(1282046): a, c, g or t
  modified_base (1282058)..(1282058): a, c, g or t
  modified_base (1283691)..(1283691): a, c, g or t
  modified_base (1284212)..(1284212): a, c, g or t
  modified_base (1284767)..(1284770): a, c, g or t
  modified_base (1286487)..(1286487): a, c, g or t
  modified_base (1287096)..(1287102): a, c, g or t
  modified_base (1287635)..(1287635): a, c, g or t
  modified_base (1291436)..(1291436): a, c, g or t
  modified_base (1291839)..(1291839): a, c, g or t
  modified_base (1294397)..(1294397): a, c, g or t
  modified_base (1298599)..(1298599): a, c, g or t
  modified_base (1298754)..(1298754): a, c, g or t
  modified_base (1303271)..(1303271): a, c, g or t
  modified_base (1303275)..(1303277): a, c, g or t
  modified_base (1307233)..(1307233): a, c, g or t
  modified_base (1307741)..(1307741): a, c, g or t
  modified_base (1310577)..(1310577): a, c, g or t
  modified_base (1312263)..(1312263): a, c, g or t
  modified_base (1313349)..(1313349): a, c, g or t
  modified_base (1314821)..(1314821): a, c, g or t
  modified_base (1314872)..(1314882): a, c, g or t
  modified_base (1315434)..(1315438): a, c, g or t
  modified_base (1315645)..(1315645): a, c, g or t
  modified_base (1316814)..(1316814): a, c, g or t
  modified_base (1318118)..(1318118): a, c, g or t
  modified_base (1320185)..(1320187): a, c, g or t
  modified_base (1320189)..(1320194): a, c, g or t
  modified_base (1323825)..(1323825): a, c, g or t
  modified_base (1324648)..(1324648): a, c, g or t
  modified_base (1325200)..(1325203): a, c, g or t
  modified_base (1325371)..(1325371): a, c, g or t
  modified_base (1326909)..(1326909): a, c, g or t
  modified_base (1328263)..(1328270): a, c, g or t
  modified_base (1328277)..(1328278): a, c, g or t
  modified_base (1329817)..(1329817): a, c, g or t
  modified_base (1331232)..(1331232): a, c, g or t
  modified_base (1331439)..(1331439): a, c, g or t
  modified_base (1331620)..(1331621): a, c, g or t
  modified_base (1331624)..(1331628): a, c, g or t
  modified_base (1332791)..(1332795): a, c, g or t
  modified_base (1333054)..(1333054): a, c, g or t
  modified_base (1333299)..(1333299): a, c, g or t
  modified_base (1333418)..(1333418): a, c, g or t
  modified_base (1333919)..(1333919): a, c, g or t
  modified_base (1333973)..(1333973): a, c, g or t
  modified_base (1333999)..(1333999): a, c, g or t
  modified_base (1334011)..(1334012): a, c, g or t
  modified_base (1335064)..(1335065): a, c, g or t
  modified_base (1335582)..(1335582): a, c, g or t
  modified_base (1337840)..(1337840): a, c, g or t
  modified_base (1337846)..(1337847): a, c, g or t
  modified_base (1340412)..(1340412): a, c, g or t
  modified_base (1341097)..(1341097): a, c, g or t
  modified_base (1341563)..(1341569): a, c, g or t
  modified_base (1342551)..(1342558): a, c, g or t
  modified_base (1348479)..(1348479): a, c, g or t
  modified_base (1350257)..(1350258): a, c, g or t
  modified_base (1352169)..(1352170): a, c, g or t
  modified_base (1352259)..(1352262): a, c, g or t
  modified_base (1352267)..(1352271): a, c, g or t
  modified_base (1352317)..(1352320): a, c, g or t
  modified_base (1352324)..(1352387): a, c, g or t
  modified_base (1352423)..(1352465): a, c, g or t
  modified_base (1352656)..(1352656): a, c, g or t
  modified_base (1353430)..(1353433): a, c, g or t
  modified_base (1353435)..(1353435): a, c, g or t
  modified_base (1354508)..(1354509): a, c, g or t
  modified_base (1355307)..(1355307): a, c, g or t
  modified_base (1355697)..(1355699): a, c, g or t
  modified_base (1356949)..(1356951): a, c, g or t
  modified_base (1357170)..(1357181): a, c, g or t
  modified_base (1357350)..(1358587): a, c, g or t
  modified_base (1366839)..(1366839): a, c, g or t
  modified_base (1366888)..(1366954): a, c, g or t
  modified_base (1367332)..(1367333): a, c, g or t
  modified_base (1367339)..(1367340): a, c, g or t
  modified_base (1368232)..(1368232): a, c, g or t
  modified_base (1369858)..(1369858): a, c, g or t
  modified_base (1369867)..(1369872): a, c, g or t
  modified_base (1370929)..(1370929): a, c, g or t
  modified_base (1371105)..(1371105): a, c, g or t
  modified_base (1371108)..(1371115): a, c, g or t
  modified_base (1373576)..(1373576): a, c, g or t
  modified_base (1375527)..(1375530): a, c, g or t
  modified_base (1375582)..(1375582): a, c, g or t
  modified_base (1375587)..(1375596): a, c, g or t
  modified_base (1375601)..(1375601): a, c, g or t
  modified_base (1375717)..(1375720): a, c, g or t
  modified_base (1377373)..(1377373): a, c, g or t
  modified_base (1377385)..(1377385): a, c, g or t
  modified_base (1377427)..(1377427): a, c, g or t
  modified_base (1377484)..(1377484): a, c, g or t
  modified_base (1377628)..(1377628): a, c, g or t
  modified_base (1377652)..(1377652): a, c, g or t
  modified_base (1378226)..(1378229): a, c, g or t
  modified_base (1378272)..(1378272): a, c, g or t
  modified_base (1379300)..(1379303): a, c, g or t
  modified_base (1380794)..(1380794): a, c, g or t
  modified_base (1381050)..(1381050): a, c, g or t
  modified_base (1381132)..(1381132): a, c, g or t
  modified_base (1381170)..(1381170): a, c, g or t
  modified_base (1381532)..(1381536): a, c, g or t
  modified_base (1381584)..(1381584): a, c, g or t
  modified_base (1381586)..(1381586): a, c, g or t
  modified_base (1382512)..(1382554): a, c, g or t
  modified_base (1382657)..(1382696): a, c, g or t
  modified_base (1382843)..(1382898): a, c, g or t
  modified_base (1382932)..(1382971): a, c, g or t
  modified_base (1383336)..(1383336): a, c, g or t
  modified_base (1383462)..(1383462): a, c, g or t
  modified_base (1383464)..(1383465): a, c, g or t
  modified_base (1383470)..(1383470): a, c, g or t
  modified_base (1383549)..(1383559): a, c, g or t
  modified_base (1383623)..(1383628): a, c, g or t
  modified_base (1383659)..(1383659): a, c, g or t
  modified_base (1383667)..(1383681): a, c, g or t
  modified_base (1383758)..(1383766): a, c, g or t
  modified_base (1383971)..(1383971): a, c, g or t
  modified_base (1384102)..(1384102): a, c, g or t
  modified_base (1384312)..(1384312): a, c, g or t
  modified_base (1384456)..(1384456): a, c, g or t
  modified_base (1384462)..(1384466): a, c, g or t
  modified_base (1384475)..(1384478): a, c, g or t
  modified_base (1384525)..(1384525): a, c, g or t
  modified_base (1384529)..(1384529): a, c, g or t
  modified_base (1384533)..(1384547): a, c, g or t
  modified_base (1384556)..(1384557): a, c, g or t
  modified_base (1384670)..(1384670): a, c, g or t
  modified_base (1385004)..(1385007): a, c, g or t
  modified_base (1385009)..(1385011): a, c, g or t
  modified_base (1385026)..(1385026): a, c, g or t
  modified_base (1385107)..(1385109): a, c, g or t
  modified_base (1385288)..(1385288): a, c, g or t
  modified_base (1385378)..(1385416): a, c, g or t
  modified_base (1385532)..(1385532): a, c, g or t
  modified_base (1385598)..(1385598): a, c, g or t
  modified_base (1385607)..(1385648): a, c, g or t
  modified_base (1385779)..(1385784): a, c, g or t
  modified_base (1385874)..(1385874): a, c, g or t
  modified_base (1385995)..(1385997): a, c, g or t
  modified_base (1386004)..(1386005): a, c, g or t
  modified_base (1386011)..(1386011): a, c, g or t
  modified_base (1386237)..(1386237): a, c, g or t
  modified_base (1386292)..(1386292): a, c, g or t
  modified_base (1386321)..(1386323): a, c, g or t
  modified_base (1386325)..(1386326): a, c, g or t
  modified_base (1386385)..(1386385): a, c, g or t
  modified_base (1386460)..(1386463): a, c, g or t
  modified_base (1386563)..(1386567): a, c, g or t
  modified_base (1386571)..(1386571): a, c, g or t
  modified_base (1386574)..(1386574): a, c, g or t
  modified_base (1386838)..(1386838): a, c, g or t
  modified_base (1386873)..(1386873): a, c, g or t
  modified_base (1386883)..(1386883): a, c, g or t
  modified_base (1386904)..(1386904): a, c, g or t
  modified_base (1386919)..(1386919): a, c, g or t
  modified_base (1386958)..(1386958): a, c, g or t
  modified_base (1386990)..(1386990): a, c, g or t
  modified_base (1386997)..(1386997): a, c, g or t
  modified_base (1387190)..(1387204): a, c, g or t
  modified_base (1387249)..(1387249): a, c, g or t
  modified_base (1387300)..(1387300): a, c, g or t
  modified_base (1387321)..(1387321): a, c, g or t
  modified_base (1387372)..(1387372): a, c, g or t
  modified_base (1387384)..(1387384): a, c, g or t
  modified_base (1387429)..(1387607): a, c, g or t
  modified_base (1387647)..(1387715): a, c, g or t
  modified_base (1387718)..(1387721): a, c, g or t
  modified_base (1387730)..(1387731): a, c, g or t
  modified_base (1387792)..(1387854): a, c, g or t
  modified_base (1387889)..(1387935): a, c, g or t
  modified_base (1387938)..(1387940): a, c, g or t
  modified_base (1387946)..(1387947): a, c, g or t
  modified_base (1387977)..(1387978): a, c, g or t
  modified_base (1387980)..(1388001): a, c, g or t
  modified_base (1388011)..(1388012): a, c, g or t
  modified_base (1388016)..(1388019): a, c, g or t
  modified_base (1388115)..(1388119): a, c, g or t
  modified_base (1388122)..(1388122): a, c, g or t
  modified_base (1388137)..(1388142): a, c, g or t
  modified_base (1388173)..(1388186): a, c, g or t
  modified_base (1388210)..(1388219): a, c, g or t
  modified_base (1388224)..(1388224): a, c, g or t
  modified_base (1388271)..(1388355): a, c, g or t
  modified_base (1388357)..(1388358): a, c, g or t
  modified_base (1388406)..(1388495): a, c, g or t
  modified_base (1388522)..(1388522): a, c, g or t
  modified_base (1388593)..(1388630): a, c, g or t
  modified_base (1388633)..(1388633): a, c, g or t
  modified_base (1388669)..(1388738): a, c, g or t
  modified_base (1388775)..(1388844): a, c, g or t
  modified_base (1388871)..(1388937): a, c, g or t
  modified_base (1388961)..(1389295): a, c, g or t
  modified_base (1389305)..(1389308): a, c, g or t
  modified_base (1389331)..(1389406): a, c, g or t
  modified_base (1389430)..(1389543): a, c, g or t
  modified_base (1389569)..(1389569): a, c, g or t
  modified_base (1389571)..(1389572): a, c, g or t
  modified_base (1389574)..(1389575): a, c, g or t
  modified_base (1389577)..(1389618): a, c, g or t
  modified_base (1389700)..(1389704): a, c, g or t
  modified_base (1389718)..(1389719): a, c, g or t
  modified_base (1389764)..(1389803): a, c, g or t
  modified_base (1389805)..(1389806): a, c, g or t
  modified_base (1389865)..(1389866): a, c, g or t
  modified_base (1389889)..(1389890): a, c, g or t
  modified_base (1389919)..(1390076): a, c, g or t
  modified_base (1390078)..(1390082): a, c, g or t
  modified_base (1390124)..(1390145): a, c, g or t
  modified_base (1390159)..(1390159): a, c, g or t
  modified_base (1390172)..(1390173): a, c, g or t
  modified_base (1390175)..(1390182): a, c, g or t
  modified_base (1390208)..(1390208): a, c, g or t
  modified_base (1390224)..(1390253): a, c, g or t
  modified_base (1390386)..(1390427): a, c, g or t
  modified_base (1390459)..(1390466): a, c, g or t
  modified_base (1390518)..(1390522): a, c, g or t
  modified_base (1390551)..(1390554): a, c, g or t
  modified_base (1390556)..(1390612): a, c, g or t
  modified_base (1390642)..(1390682): a, c, g or t
  modified_base (1390718)..(1390719): a, c, g or t
  modified_base (1390752)..(1390765): a, c, g or t
  modified_base (1390789)..(1390841): a, c, g or t
  modified_base (1390853)..(1390854): a, c, g or t
  modified_base (1390865)..(1390954): a, c, g or t
  modified_base (1390994)..(1391033): a, c, g or t
  modified_base (1391058)..(1391174): a, c, g or t
  modified_base (1391206)..(1391240): a, c, g or t
  modified_base (1391263)..(1391305): a, c, g or t
  modified_base (1391334)..(1391384): a, c, g or t
  modified_base (1391604)..(1391655): a, c, g or t
  modified_base (1391681)..(1391693): a, c, g or t
  modified_base (1391724)..(1391724): a, c, g or t
  modified_base (1391729)..(1391729): a, c, g or t
  modified_base (1391807)..(1391810): a, c, g or t
  modified_base (1391855)..(1391862): a, c, g or t
  modified_base (1391923)..(1391925): a, c, g or t
  modified_base (1391968)..(1391969): a, c, g or t
  modified_base (1392020)..(1392071): a, c, g or t
  modified_base (1392074)..(1392074): a, c, g or t
  modified_base (1392324)..(1392332): a, c, g or t
  modified_base (1392335)..(1392338): a, c, g or t
  modified_base (1392360)..(1392360): a, c, g or t
  modified_base (1392399)..(1392399): a, c, g or t
  modified_base (1392404)..(1392410): a, c, g or t
  modified_base (1392420)..(1392421): a, c, g or t
  modified_base (1392434)..(1392440): a, c, g or t
  modified_base (1392487)..(1392490): a, c, g or t
  modified_base (1392492)..(1392499): a, c, g or t
  modified_base (1392528)..(1392550): a, c, g or t
  modified_base (1392562)..(1392563): a, c, g or t
  modified_base (1392579)..(1392580): a, c, g or t
  modified_base (1392583)..(1392585): a, c, g or t
  modified_base (1392587)..(1392588): a, c, g or t
  modified_base (1392630)..(1392641): a, c, g or t
  modified_base (1392691)..(1392703): a, c, g or t
  modified_base (1392756)..(1392803): a, c, g or t
  modified_base (1392853)..(1392856): a, c, g or t
  modified_base (1392858)..(1392977): a, c, g or t
  modified_base (1393015)..(1393015): a, c, g or t
  modified_base (1393038)..(1393079): a, c, g or t
  modified_base (1393107)..(1393153): a, c, g or t
  modified_base (1393155)..(1393155): a, c, g or t
  modified_base (1393221)..(1393222): a, c, g or t
  modified_base (1393233)..(1393234): a, c, g or t
  modified_base (1393236)..(1393237): a, c, g or t
  modified_base (1393470)..(1393470): a, c, g or t
  modified_base (1393576)..(1393577): a, c, g or t
  modified_base (1393598)..(1393599): a, c, g or t
  modified_base (1393872)..(1393872): a, c, g or t
  modified_base (1393897)..(1393897): a, c, g or t
  modified_base (1393959)..(1393960): a, c, g or t
  modified_base (1394228)..(1394228): a, c, g or t
  modified_base (1394231)..(1394232): a, c, g or t
  modified_base (1394252)..(1394252): a, c, g or t
  modified_base (1395101)..(1395101): a, c, g or t
  modified_base (1395200)..(1395201): a, c, g or t
  modified_base (1395353)..(1395353): a, c, g or t
  modified_base (1396060)..(1396060): a, c, g or t
  modified_base (1396339)..(1396339): a, c, g or t
  modified_base (1396403)..(1396403): a, c, g or t
  modified_base (1396406)..(1396410): a, c, g or t
  modified_base (1396769)..(1396783): a, c, g or t
  modified_base (1397426)..(1397426): a, c, g or t
  modified_base (1397848)..(1397848): a, c, g or t
  modified_base (1397855)..(1397855): a, c, g or t
  modified_base (1398406)..(1398407): a, c, g or t
  modified_base (1398534)..(1398548): a, c, g or t
  modified_base (1398602)..(1398603): a, c, g or t
  modified_base (1398617)..(1398618): a, c, g or t
  modified_base (1398620)..(1398622): a, c, g or t
  modified_base (1398627)..(1398634): a, c, g or t
  modified_base (1398638)..(1398638): a, c, g or t
  modified_base (1398641)..(1398642): a, c, g or t
  modified_base (1398705)..(1398705): a, c, g or t
  modified_base (1398792)..(1398792): a, c, g or t
  modified_base (1398816)..(1398816): a, c, g or t
  modified_base (1398849)..(1398859): a, c, g or t
  modified_base (1398861)..(1398862): a, c, g or t
  modified_base (1398883)..(1398907): a, c, g or t
  modified_base (1398909)..(1398910): a, c, g or t
  modified_base (1398942)..(1398942): a, c, g or t
  modified_base (1399172)..(1399172): a, c, g or t
  modified_base (1399260)..(1399260): a, c, g or t
  modified_base (1399310)..(1399310): a, c, g or t
  modified_base (1399315)..(1399315): a, c, g or t
  modified_base (1399426)..(1399426): a, c, g or t
  modified_base (1399450)..(1399450): a, c, g or t
  modified_base (1399577)..(1399577): a, c, g or t
  modified_base (1399778)..(1399781): a, c, g or t
  modified_base (1399787)..(1399823): a, c, g or t
  modified_base (1400090)..(1400090): a, c, g or t
  modified_base (1400105)..(1400109): a, c, g or t
  modified_base (1400124)..(1400163): a, c, g or t
  modified_base (1400207)..(1400247): a, c, g or t
  modified_base (1400552)..(1400553): a, c, g or t
  modified_base (1400979)..(1400983): a, c, g or t
  modified_base (1405255)..(1405260): a, c, g or t
  modified_base (1405494)..(1405505): a, c, g or t
  modified_base (1406417)..(1406417): a, c, g or t
  modified_base (1406764)..(1406764): a, c, g or t
  modified_base (1406792)..(1406793): a, c, g or t
  modified_base (1406797)..(1406805): a, c, g or t
  modified_base (1406830)..(1406831): a, c, g or t
  modified_base (1406883)..(1406884): a, c, g or t
  modified_base (1406886)..(1406889): a, c, g or t
  modified_base (1407458)..(1407504): a, c, g or t
  modified_base (1407507)..(1407508): a, c, g or t
  modified_base (1407891)..(1407891): a, c, g or t
  modified_base (1408275)..(1408280): a, c, g or t
  modified_base (1408933)..(1408934): a, c, g or t
  modified_base (1409218)..(1409219): a, c, g or t
  modified_base (1409708)..(1409708): a, c, g or t
  modified_base (1412823)..(1412826): a, c, g or t
  modified_base (1413103)..(1413104): a, c, g or t
  modified_base (1413106)..(1413107): a, c, g or t
  modified_base (1414767)..(1414767): a, c, g or t
  modified_base (1415091)..(1415091): a, c, g or t
  modified_base (1416038)..(1416044): a, c, g or t
  modified_base (1416903)..(1416903): a, c, g or t
  modified_base (1418014)..(1418014): a, c, g or t
  modified_base (1418338)..(1418338): a, c, g or t
  modified_base (1419031)..(1419040): a, c, g or t
  modified_base (1421619)..(1421619): a, c, g or t
  modified_base (1421628)..(1421629): a, c, g or t
  modified_base (1423341)..(1423341): a, c, g or t
  modified_base (1427439)..(1427439): a, c, g or t
  modified_base (1427546)..(1427551): a, c, g or t
  modified_base (1427913)..(1427913): a, c, g or t
  modified_base (1432186)..(1432189): a, c, g or t
  modified_base (1432998)..(1432998): a, c, g or t
  modified_base (1433516)..(1433523): a, c, g or t
  modified_base (1437134)..(1437137): a, c, g or t
  modified_base (1437426)..(1437426): a, c, g or t
  modified_base (1438534)..(1438534): a, c, g or t
  modified_base (1439640)..(1439640): a, c, g or t
  modified_base (1441530)..(1441530): a, c, g or t
  modified_base (1442941)..(1442965): a, c, g or t
  modified_base (1443380)..(1443381): a, c, g or t
  modified_base (1443541)..(1443544): a, c, g or t
  modified_base (1445050)..(1445050): a, c, g or t
  modified_base (1445178)..(1445178): a, c, g or t
  modified_base (1445340)..(1445344): a, c, g or t
  modified_base (1445752)..(1445752): a, c, g or t
  modified_base (1445757)..(1445757): a, c, g or t
  modified_base (1447007)..(1447007): a, c, g or t
  modified_base (1447062)..(1447062): a, c, g or t
  modified_base (1447088)..(1447088): a, c, g or t
  modified_base (1447499)..(1447499): a, c, g or t
  modified_base (1447684)..(1447684): a, c, g or t
  modified_base (1450086)..(1450091): a, c, g or t
  modified_base (1450413)..(1450413): a, c, g or t
  modified_base (1450416)..(1450416): a, c, g or t
  modified_base (1450987)..(1450987): a, c, g or t
  modified_base (1451157)..(1451157): a, c, g or t
  modified_base (1451872)..(1451872): a, c, g or t
  modified_base (1453118)..(1453118): a, c, g or t
  modified_base (1457272)..(1457272): a, c, g or t
  modified_base (1458070)..(1458070): a, c, g or t
  modified_base (1459429)..(1459430): a, c, g or t
  modified_base (1461997)..(1461998): a, c, g or t
  modified_base (1462539)..(1462539): a, c, g or t
  modified_base (1463127)..(1463130): a, c, g or t
  modified_base (1464818)..(1464818): a, c, g or t
  modified_base (1466171)..(1466171): a, c, g or t
  modified_base (1467834)..(1467834): a, c, g or t
  modified_base (1471769)..(1471769): a, c, g or t
  modified_base (1471797)..(1471797): a, c, g or t
  modified_base (1472999)..(1473000): a, c, g or t
  modified_base (1474026)..(1474026): a, c, g or t
  modified_base (1474427)..(1474427): a, c, g or t
  modified_base (1475844)..(1475851): a, c, g or t
  modified_base (1475865)..(1475866): a, c, g or t
  modified_base (1476712)..(1476712): a, c, g or t
  modified_base (1476923)..(1476923): a, c, g or t
  modified_base (1476940)..(1476940): a, c, g or t
  modified_base (1481318)..(1481322): a, c, g or t
  modified_base (1481908)..(1481908): a, c, g or t
  modified_base (1482389)..(1482389): a, c, g or t
  modified_base (1483287)..(1483287): a, c, g or t
  modified_base (1484902)..(1484902): a, c, g or t
  modified_base (1485652)..(1485652): a, c, g or t
  modified_base (1486788)..(1486788): a, c, g or t
  modified_base (1487836)..(1487836): a, c, g or t
  modified_base (1487857)..(1487857): a, c, g or t
  modified_base (1487972)..(1487972): a, c, g or t
  modified_base (1487975)..(1487975): a, c, g or t
  modified_base (1488366)..(1488366): a, c, g or t
  modified_base (1489246)..(1489246): a, c, g or t
  modified_base (1490015)..(1490019): a, c, g or t
  modified_base (1490196)..(1490196): a, c, g or t
  modified_base (1492278)..(1492278): a, c, g or t
  modified_base (1493706)..(1493706): a, c, g or t
  modified_base (1493929)..(1493930): a, c, g or t
  modified_base (1494624)..(1494624): a, c, g or t
  modified_base (1495870)..(1495880): a, c, g or t
  modified_base (1496006)..(1496012): a, c, g or t
  modified_base (1497023)..(1497023): a, c, g or t
  modified_base (1497069)..(1497073): a, c, g or t
  modified_base (1497757)..(1497757): a, c, g or t
  modified_base (1497759)..(1497759): a, c, g or t
  modified_base (1499384)..(1499384): a, c, g or t
  modified_base (1499708)..(1499708): a, c, g or t
  modified_base (1499938)..(1499953): a, c, g or t
  modified_base (1500773)..(1500791): a, c, g or t
  modified_base (1501228)..(1501228): a, c, g or t
  modified_base (1501911)..(1501916): a, c, g or t
  modified_base (1502298)..(1502298): a, c, g or t
  modified_base (1502389)..(1502389): a, c, g or t
  modified_base (1502394)..(1502394): a, c, g or t
  modified_base (1502573)..(1502575): a, c, g or t
  modified_base (1502577)..(1502577): a, c, g or t
  modified_base (1502603)..(1502607): a, c, g or t
  modified_base (1502610)..(1502610): a, c, g or t
  modified_base (1502622)..(1502622): a, c, g or t
  modified_base (1502652)..(1502652): a, c, g or t
  modified_base (1502694)..(1502700): a, c, g or t
  modified_base (1502705)..(1502706): a, c, g or t
  modified_base (1502762)..(1502768): a, c, g or t
  modified_base (1502772)..(1502773): a, c, g or t
  modified_base (1502789)..(1502816): a, c, g or t
  modified_base (1502848)..(1502854): a, c, g or t
  modified_base (1502933)..(1502950): a, c, g or t
  modified_base (1502956)..(1502956): a, c, g or t
  modified_base (1503060)..(1503060): a, c, g or t
  modified_base (1503096)..(1503099): a, c, g or t
  modified_base (1503183)..(1503183): a, c, g or t
  modified_base (1504519)..(1504519): a, c, g or t
  modified_base (1505266)..(1505269): a, c, g or t
  modified_base (1505400)..(1505400): a, c, g or t
  modified_base (1506851)..(1506851): a, c, g or t
  modified_base (1506853)..(1506854): a, c, g or t
  modified_base (1506856)..(1506857): a, c, g or t
  modified_base (1507910)..(1507910): a, c, g or t
  modified_base (1508335)..(1508339): a, c, g or t
  modified_base (1509137)..(1509137): a, c, g or t
  modified_base (1509752)..(1509752): a, c, g or t
  modified_base (1510869)..(1510869): a, c, g or t
  modified_base (1510915)..(1510915): a, c, g or t
  modified_base (1511381)..(1511381): a, c, g or t
  modified_base (1511406)..(1511406): a, c, g or t
  modified_base (1512185)..(1512186): a, c, g or t
  modified_base (1512190)..(1512191): a, c, g or t
  modified_base (1512837)..(1512837): a, c, g or t
  modified_base (1513073)..(1513073): a, c, g or t
  modified_base (1513612)..(1513616): a, c, g or t
  modified_base (1513714)..(1513714): a, c, g or t
  modified_base (1514240)..(1514240): a, c, g or t
  modified_base (1514277)..(1514513): a, c, g or t
  modified_base (1514528)..(1514532): a, c, g or t
  modified_base (1514564)..(1514564): a, c, g or t
  modified_base (1514616)..(1514859): a, c, g or t
  modified_base (1514889)..(1514937): a, c, g or t
  modified_base (1514950)..(1514950): a, c, g or t
  modified_base (1514972)..(1514972): a, c, g or t
  modified_base (1514977)..(1515019): a, c, g or t
  modified_base (1515030)..(1515031): a, c, g or t
  modified_base (1515055)..(1515098): a, c, g or t
  modified_base (1515119)..(1515120): a, c, g or t
  modified_base (1515132)..(1515179): a, c, g or t
  modified_base (1515182)..(1515183): a, c, g or t
  modified_base (1515213)..(1515263): a, c, g or t
  modified_base (1515290)..(1515444): a, c, g or t
  modified_base (1515451)..(1515452): a, c, g or t
  modified_base (1515456)..(1515457): a, c, g or t
  modified_base (1515461)..(1515462): a, c, g or t
  modified_base (1515483)..(1515483): a, c, g or t
  modified_base (1515490)..(1515564): a, c, g or t
  modified_base (1515595)..(1515707): a, c, g or t
  modified_base (1515718)..(1515719): a, c, g or t
  modified_base (1515724)..(1515727): a, c, g or t
  modified_base (1515731)..(1515736): a, c, g or t
  modified_base (1515738)..(1515738): a, c, g or t
  modified_base (1515747)..(1515748): a, c, g or t
  modified_base (1515758)..(1515801): a, c, g or t
  modified_base (1515928)..(1515928): a, c, g or t
  modified_base (1515937)..(1515937): a, c, g or t
  modified_base (1515940)..(1515940): a, c, g or t
  modified_base (1515943)..(1515943): a, c, g or t
  modified_base (1515967)..(1516010): a, c, g or t
  modified_base (1516074)..(1516138): a, c, g or t
  modified_base (1516149)..(1516149): a, c, g or t
  modified_base (1516154)..(1516154): a, c, g or t
  modified_base (1516221)..(1516225): a, c, g or t
  modified_base (1516376)..(1516396): a, c, g or t
  modified_base (1516402)..(1516402): a, c, g or t
  modified_base (1516486)..(1516493): a, c, g or t
  modified_base (1516537)..(1516590): a, c, g or t
  modified_base (1516592)..(1516593): a, c, g or t
  modified_base (1516632)..(1516633): a, c, g or t
  modified_base (1516635)..(1516640): a, c, g or t
  modified_base (1516654)..(1516654): a, c, g or t
  modified_base (1516664)..(1516665): a, c, g or t
  modified_base (1516671)..(1516923): a, c, g or t
  modified_base (1516929)..(1516931): a, c, g or t
  modified_base (1516946)..(1516946): a, c, g or t
  modified_base (1516977)..(1517031): a, c, g or t
  modified_base (1517090)..(1517207): a, c, g or t
  modified_base (1517216)..(1517217): a, c, g or t
  modified_base (1517229)..(1517352): a, c, g or t
  modified_base (1517381)..(1517392): a, c, g or t
  modified_base (1517406)..(1517406): a, c, g or t
  modified_base (1517439)..(1517498): a, c, g or t
  modified_base (1517501)..(1517502): a, c, g or t
  modified_base (1517536)..(1517579): a, c, g or t
  modified_base (1517607)..(1517650): a, c, g or t
  modified_base (1517667)..(1517668): a, c, g or t
  modified_base (1517716)..(1517719): a, c, g or t
  modified_base (1517755)..(1517799): a, c, g or t
  modified_base (1517862)..(1517899): a, c, g or t
  modified_base (1517932)..(1517932): a, c, g or t
  modified_base (1517935)..(1518237): a, c, g or t
  modified_base (1518270)..(1518273): a, c, g or t
  modified_base (1518275)..(1518334): a, c, g or t
  modified_base (1518378)..(1518392): a, c, g or t
  modified_base (1518408)..(1518408): a, c, g or t
  modified_base (1518416)..(1518425): a, c, g or t
  modified_base (1518444)..(1518445): a, c, g or t
  modified_base (1518449)..(1518450): a, c, g or t
  modified_base (1518454)..(1518454): a, c, g or t
  modified_base (1518474)..(1518479): a, c, g or t
  modified_base (1518503)..(1518531): a, c, g or t
  modified_base (1518540)..(1518540): a, c, g or t
  modified_base (1518552)..(1518552): a, c, g or t
  modified_base (1518555)..(1518576): a, c, g or t
  modified_base (1518600)..(1518607): a, c, g or t
  modified_base (1518634)..(1518644): a, c, g or t
  modified_base (1518668)..(1518718): a, c, g or t
  modified_base (1518743)..(1518743): a, c, g or t
  modified_base (1518763)..(1518930): a, c, g or t
  modified_base (1518954)..(1519119): a, c, g or t
  modified_base (1519207)..(1519254): a, c, g or t
  modified_base (1519258)..(1519259): a, c, g or t
  modified_base (1519333)..(1519339): a, c, g or t
  modified_base (1520026)..(1520026): a, c, g or t
  modified_base (1520112)..(1520112): a, c, g or t
  modified_base (1520177)..(1520177): a, c, g or t
  modified_base (1520230)..(1520234): a, c, g or t
  modified_base (1520273)..(1520273): a, c, g or t
  modified_base (1520309)..(1520309): a, c, g or t
  modified_base (1520596)..(1520598): a, c, g or t
  modified_base (1520654)..(1520668): a, c, g or t
  modified_base (1520693)..(1520737): a, c, g or t
  modified_base (1520809)..(1520824): a, c, g or t
  modified_base (1520894)..(1521090): a, c, g or t
  modified_base (1521094)..(1521095): a, c, g or t
  modified_base (1521113)..(1521115): a, c, g or t
  modified_base (1521149)..(1521150): a, c, g or t
  modified_base (1521189)..(1521200): a, c, g or t
  modified_base (1521209)..(1521210): a, c, g or t
  modified_base (1521212)..(1521215): a, c, g or t
  modified_base (1521218)..(1521219): a, c, g or t
  modified_base (1521221)..(1521222): a, c, g or t
  modified_base (1521224)..(1521254): a, c, g or t
  modified_base (1521256)..(1521257): a, c, g or t
  modified_base (1521260)..(1521261): a, c, g or t
  modified_base (1521270)..(1521271): a, c, g or t
  modified_base (1521301)..(1521311): a, c, g or t
  modified_base (1521315)..(1521316): a, c, g or t
  modified_base (1521361)..(1521362): a, c, g or t
  modified_base (1521367)..(1521367): a, c, g or t
  modified_base (1521465)..(1521465): a, c, g or t
  modified_base (1521526)..(1521527): a, c, g or t
  modified_base (1521531)..(1521532): a, c, g or t
  modified_base (1521606)..(1521607): a, c, g or t
  modified_base (1521611)..(1521612): a, c, g or t
  modified_base (1521626)..(1521627): a, c, g or t
  modified_base (1521629)..(1521630): a, c, g or t
  modified_base (1521662)..(1521663): a, c, g or t
  modified_base (1521666)..(1521667): a, c, g or t
  modified_base (1521759)..(1521760): a, c, g or t
  modified_base (1521762)..(1521763): a, c, g or t
  modified_base (1522278)..(1522281): a, c, g or t
  modified_base (1522332)..(1522335): a, c, g or t
  modified_base (1522338)..(1522339): a, c, g or t
  modified_base (1522576)..(1522579): a, c, g or t
  modified_base (1522742)..(1522743): a, c, g or t
  modified_base (1522935)..(1522938): a, c, g or t
  modified_base (1522969)..(1522970): a, c, g or t
  modified_base (1522974)..(1523047): a, c, g or t
  modified_base (1523071)..(1523076): a, c, g or t
  modified_base (1523111)..(1523112): a, c, g or t
  modified_base (1523115)..(1523116): a, c, g or t
  modified_base (1523119)..(1523272): a, c, g or t
  modified_base (1523296)..(1523306): a, c, g or t
  modified_base (1523338)..(1523382): a, c, g or t
  modified_base (1523404)..(1523414): a, c, g or t
  modified_base (1523418)..(1523419): a, c, g or t
  modified_base (1523438)..(1523440): a, c, g or t
  modified_base (1523483)..(1523506): a, c, g or t
  modified_base (1523532)..(1524912): a, c, g or t
  modified_base (1524936)..(1524963): a, c, g or t
  modified_base (1524968)..(1524969): a, c, g or t
  modified_base (1524995)..(1524995): a, c, g or t
  modified_base (1525020)..(1525045): a, c, g or t
  modified_base (1525065)..(1525065): a, c, g or t
  modified_base (1525068)..(1525107): a, c, g or t
  modified_base (1525111)..(1525111): a, c, g or t
  modified_base (1525128)..(1525175): a, c, g or t
  modified_base (1525780)..(1525780): a, c, g or t
  modified_base (1526424)..(1526425): a, c, g or t
  modified_base (1526429)..(1526431): a, c, g or t
  modified_base (1526436)..(1526442): a, c, g or t
  modified_base (1526445)..(1526447): a, c, g or t
  modified_base (1526467)..(1526468): a, c, g or t
  modified_base (1526474)..(1526492): a, c, g or t
  modified_base (1526514)..(1526514): a, c, g or t
  modified_base (1526520)..(1526523): a, c, g or t
  modified_base (1526525)..(1526528): a, c, g or t
  modified_base (1526537)..(1526538): a, c, g or t
  modified_base (1526542)..(1526543): a, c, g or t
  modified_base (1526545)..(1526547): a, c, g or t
  modified_base (1526551)..(1526552): a, c, g or t
  modified_base (1526556)..(1526557): a, c, g or t
  modified_base (1526571)..(1526849): a, c, g or t
  modified_base (1526873)..(1527022): a, c, g or t
  modified_base (1527035)..(1527035): a, c, g or t
  modified_base (1527047)..(1527048): a, c, g or t
  modified_base (1527057)..(1527058): a, c, g or t
  modified_base (1527069)..(1527070): a, c, g or t
  modified_base (1528400)..(1528446): a, c, g or t
  modified_base (1528641)..(1528642): a, c, g or t
  modified_base (1528674)..(1528677): a, c, g or t
  modified_base (1528828)..(1528829): a, c, g or t
  modified_base (1528862)..(1528863): a, c, g or t
  modified_base (1529032)..(1529032): a, c, g or t
  modified_base (1529338)..(1529339): a, c, g or t
  modified_base (1529848)..(1529851): a, c, g or t
  modified_base (1529854)..(1529854): a, c, g or t
  modified_base (1530014)..(1530014): a, c, g or t
  modified_base (1530088)..(1530088): a, c, g or t
  modified_base (1530304)..(1530304): a, c, g or t
  modified_base (1530380)..(1530381): a, c, g or t
  modified_base (1530383)..(1530383): a, c, g or t
  modified_base (1530385)..(1530388): a, c, g or t
  modified_base (1530956)..(1530956): a, c, g or t
  modified_base (1531783)..(1531783): a, c, g or t
  modified_base (1531891)..(1531891): a, c, g or t
  modified_base (1531899)..(1531899): a, c, g or t
  modified_base (1532702)..(1532702): a, c, g or t
  modified_base (1536239)..(1536239): a, c, g or t
  modified_base (1536639)..(1536639): a, c, g or t
  modified_base (1537969)..(1537974): a, c, g or t
  modified_base (1537979)..(1537979): a, c, g or t
  modified_base (1538592)..(1538592): a, c, g or t
  modified_base (1539373)..(1539376): a, c, g or t
  modified_base (1540736)..(1540736): a, c, g or t
  modified_base (1540995)..(1540995): a, c, g or t
  modified_base (1540997)..(1541000): a, c, g or t
  modified_base (1541715)..(1541715): a, c, g or t
  modified_base (1542031)..(1542031): a, c, g or t
  modified_base (1543653)..(1543653): a, c, g or t
  modified_base (1544249)..(1544252): a, c, g or t
  modified_base (1545249)..(1545252): a, c, g or t
  modified_base (1545537)..(1545540): a, c, g or t
  modified_base (1547198)..(1547198): a, c, g or t
  modified_base (1547832)..(1547832): a, c, g or t
  modified_base (1549519)..(1549520): a, c, g or t
  modified_base (1550557)..(1550563): a, c, g or t
  modified_base (1552254)..(1552254): a, c, g or t
  modified_base (1552650)..(1552650): a, c, g or t
  modified_base (1553140)..(1553140): a, c, g or t
  modified_base (1555936)..(1555936): a, c, g or t
  modified_base (1558124)..(1558128): a, c, g or t
  modified_base (1563281)..(1563281): a, c, g or t
  modified_base (1563358)..(1563378): a, c, g or t
  modified_base (1565745)..(1565745): a, c, g or t
  modified_base (1566104)..(1566107): a, c, g or t
  modified_base (1566621)..(1566621): a, c, g or t
  modified_base (1566630)..(1566630): a, c, g or t
  modified_base (1567579)..(1567579): a, c, g or t
  modified_base (1568515)..(1568515): a, c, g or t
  modified_base (1568997)..(1568997): a, c, g or t
  modified_base (1569281)..(1569281): a, c, g or t
  modified_base (1570168)..(1570169): a, c, g or t
  modified_base (1570171)..(1570190): a, c, g or t
  modified_base (1573347)..(1573347): a, c, g or t
  modified_base (1573626)..(1573627): a, c, g or t
  modified_base (1573631)..(1573632): a, c, g or t
  modified_base (1573634)..(1573637): a, c, g or t
  modified_base (1577304)..(1577304): a, c, g or t
  modified_base (1577306)..(1577309): a, c, g or t
  modified_base (1579368)..(1579379): a, c, g or t
  modified_base (1579382)..(1579382): a, c, g or t
  modified_base (1581352)..(1581352): a, c, g or t
  modified_base (1581517)..(1581517): a, c, g or t
  modified_base (1581645)..(1581645): a, c, g or t
  modified_base (1581977)..(1581977): a, c, g or t
  modified_base (1583856)..(1583856): a, c, g or t
  modified_base (1584635)..(1584635): a, c, g or t
  modified_base (1585239)..(1585240): a, c, g or t
  modified_base (1585535)..(1585538): a, c, g or t
  modified_base (1588007)..(1588007): a, c, g or t
  modified_base (1588033)..(1588033): a, c, g or t
  modified_base (1588400)..(1588403): a, c, g or t
  modified_base (1591039)..(1591039): a, c, g or t
  modified_base (1591400)..(1591401): a, c, g or t
  modified_base (1591418)..(1591418): a, c, g or t
  modified_base (1593874)..(1593875): a, c, g or t
  modified_base (1593877)..(1593880): a, c, g or t
  modified_base (1597600)..(1597600): a, c, g or t
  modified_base (1598156)..(1598156): a, c, g or t
  modified_base (1598577)..(1598577): a, c, g or t
  modified_base (1599260)..(1599260): a, c, g or t
  modified_base (1600606)..(1600606): a, c, g or t
  modified_base (1601553)..(1601556): a, c, g or t
  modified_base (1602674)..(1602674): a, c, g or t
  modified_base (1602680)..(1602680): a, c, g or t
  modified_base (1602740)..(1602740): a, c, g or t
  modified_base (1605340)..(1605340): a, c, g or t
  modified_base (1606420)..(1606420): a, c, g or t
  modified_base (1608402)..(1608402): a, c, g or t
  modified_base (1609525)..(1609525): a, c, g or t
  modified_base (1609705)..(1609706): a, c, g or t
  modified_base (1610253)..(1610253): a, c, g or t
  modified_base (1613661)..(1613676): a, c, g or t
  modified_base (1615254)..(1615254): a, c, g or t
  modified_base (1615461)..(1615465): a, c, g or t
  modified_base (1617517)..(1617517): a, c, g or t
  modified_base (1619468)..(1619468): a, c, g or t
  modified_base (1619544)..(1619545): a, c, g or t
  modified_base (1619547)..(1619549): a, c, g or t
  modified_base (1619593)..(1619621): a, c, g or t
  modified_base (1619683)..(1619683): a, c, g or t
  modified_base (1622722)..(1622731): a, c, g or t
  modified_base (1622733)..(1622734): a, c, g or t
  modified_base (1623156)..(1623156): a, c, g or t
  modified_base (1628742)..(1628743): a, c, g or t
  modified_base (1631248)..(1631248): a, c, g or t
  modified_base (1632084)..(1632084): a, c, g or t
  modified_base (1633937)..(1633938): a, c, g or t
  modified_base (1636037)..(1636037): a, c, g or t
  modified_base (1636343)..(1636343): a, c, g or t
  modified_base (1636984)..(1636987): a, c, g or t
  modified_base (1637722)..(1637722): a, c, g or t
  modified_base (1637878)..(1637880): a, c, g or t
  modified_base (1638524)..(1638524): a, c, g or t
  modified_base (1640611)..(1640613): a, c, g or t
  modified_base (1640710)..(1640711): a, c, g or t
  modified_base (1640749)..(1640761): a, c, g or t
  modified_base (1641123)..(1641131): a, c, g or t
  modified_base (1642104)..(1642104): a, c, g or t
  modified_base (1642367)..(1642367): a, c, g or t
  modified_base (1643090)..(1643103): a, c, g or t
  modified_base (1643105)..(1643106): a, c, g or t
  modified_base (1643112)..(1643113): a, c, g or t
  modified_base (1643847)..(1643852): a, c, g or t
  modified_base (1646645)..(1646649): a, c, g or t
  modified_base (1646908)..(1646911): a, c, g or t
  modified_base (1648639)..(1648639): a, c, g or t
  modified_base (1649095)..(1649095): a, c, g or t
  modified_base (1649460)..(1649470): a, c, g or t
  modified_base (1655844)..(1655844): a, c, g or t
  modified_base (1655848)..(1655850): a, c, g or t
  modified_base (1656382)..(1656393): a, c, g or t
  modified_base (1657874)..(1657874): a, c, g or t
  modified_base (1660275)..(1660275): a, c, g or t
  modified_base (1661483)..(1661483): a, c, g or t
  modified_base (1661988)..(1661988): a, c, g or t
  modified_base (1662288)..(1662288): a, c, g or t
  modified_base (1662311)..(1662311): a, c, g or t
  modified_base (1662314)..(1662314): a, c, g or t
  modified_base (1664614)..(1664619): a, c, g or t
  modified_base (1666467)..(1666468): a, c, g or t
  modified_base (1666470)..(1666471): a, c, g or t
  modified_base (1667256)..(1667261): a, c, g or t
  modified_base (1672967)..(1672981): a, c, g or t
  modified_base (1673534)..(1673534): a, c, g or t
  modified_base (1673910)..(1673915): a, c, g or t
  modified_base (1674155)..(1674156): a, c, g or t
  modified_base (1674159)..(1674163): a, c, g or t
  modified_base (1678223)..(1678223): a, c, g or t
  modified_base (1680368)..(1680372): a, c, g or t
  modified_base (1682789)..(1682789): a, c, g or t
  modified_base (1684081)..(1684082): a, c, g or t
  modified_base (1684828)..(1684828): a, c, g or t
  modified_base (1686204)..(1686204): a, c, g or t
  modified_base (1687519)..(1687522): a, c, g or t
  modified_base (1694098)..(1694098): a, c, g or t
  modified_base (1696033)..(1696036): a, c, g or t
  modified_base (1696983)..(1696983): a, c, g or t
  modified_base (1698134)..(1698134): a, c, g or t
  modified_base (1699235)..(1699235): a, c, g or t
  modified_base (1699977)..(1699977): a, c, g or t
  modified_base (1700496)..(1700496): a, c, g or t
  modified_base (1701791)..(1701791): a, c, g or t
  modified_base (1702584)..(1702585): a, c, g or t
  modified_base (1702618)..(1702627): a, c, g or t
  modified_base (1702851)..(1702851): a, c, g or t
  modified_base (1704291)..(1704291): a, c, g or t
  modified_base (1704362)..(1704362): a, c, g or t
  modified_base (1706668)..(1706678): a, c, g or t
  modified_base (1706736)..(1706736): a, c, g or t
  modified_base (1706738)..(1706746): a, c, g or t
  modified_base (1711851)..(1711851): a, c, g or t
  modified_base (1712545)..(1712553): a, c, g or t
  modified_base (1712557)..(1712558): a, c, g or t
  modified_base (1712564)..(1712565): a, c, g or t
  modified_base (1712786)..(1712786): a, c, g or t
  modified_base (1712869)..(1712869): a, c, g or t
  modified_base (1713084)..(1713092): a, c, g or t
  modified_base (1713235)..(1713235): a, c, g or t
  modified_base (1713238)..(1713238): a, c, g or t
  modified_base (1713312)..(1713312): a, c, g or t
  modified_base (1713371)..(1713371): a, c, g or t
  modified_base (1713383)..(1713383): a, c, g or t
  modified_base (1713661)..(1713661): a, c, g or t
  modified_base (1715714)..(1715721): a, c, g or t
  modified_base (1716638)..(1716638): a, c, g or t
  modified_base (1716658)..(1716658): a, c, g or t
  modified_base (1716763)..(1716763): a, c, g or t
  modified_base (1717096)..(1717096): a, c, g or t
  modified_base (1717152)..(1717152): a, c, g or t
  modified_base (1717301)..(1717301): a, c, g or t
  modified_base (1717336)..(1717336): a, c, g or t
  modified_base (1717437)..(1717437): a, c, g or t
  modified_base (1717443)..(1717443): a, c, g or t
  modified_base (1717464)..(1717464): a, c, g or t
  modified_base (1717504)..(1717504): a, c, g or t
  modified_base (1717522)..(1717522): a, c, g or t
  modified_base (1717576)..(1717579): a, c, g or t
  modified_base (1717596)..(1717596): a, c, g or t
  modified_base (1717600)..(1717601): a, c, g or t
  modified_base (1717811)..(1717812): a, c, g or t
  modified_base (1717820)..(1717821): a, c, g or t
  modified_base (1718221)..(1718222): a, c, g or t
  modified_base (1718615)..(1718615): a, c, g or t
  modified_base (1718890)..(1718890): a, c, g or t
  modified_base (1719017)..(1719020): a, c, g or t
  modified_base (1719137)..(1719138): a, c, g or t
  modified_base (1719149)..(1719149): a, c, g or t
  modified_base (1719229)..(1719229): a, c, g or t
  modified_base (1719325)..(1719326): a, c, g or t
  modified_base (1719389)..(1719390): a, c, g or t
  modified_base (1719392)..(1719430): a, c, g or t
  modified_base (1719515)..(1719546): a, c, g or t
  modified_base (1719621)..(1719649): a, c, g or t
  modified_base (1719652)..(1719653): a, c, g or t
  modified_base (1719677)..(1719678): a, c, g or t
  modified_base (1719703)..(1719729): a, c, g or t
  modified_base (1719734)..(1719735): a, c, g or t
  modified_base (1719783)..(1719798): a, c, g or t
  modified_base (1719803)..(1719805): a, c, g or t
  modified_base (1719822)..(1719823): a, c, g or t
  modified_base (1719830)..(1719831): a, c, g or t
  modified_base (1719834)..(1719841): a, c, g or t
  modified_base (1719934)..(1719951): a, c, g or t
  modified_base (1720082)..(1720083): a, c, g or t
  modified_base (1720210)..(1720211): a, c, g or t
  modified_base (1720213)..(1720254): a, c, g or t
  modified_base (1720466)..(1720471): a, c, g or t
  modified_base (1720473)..(1720474): a, c, g or t
  modified_base (1720486)..(1720489): a, c, g or t
  modified_base (1720501)..(1720509): a, c, g or t
  modified_base (1720513)..(1720514): a, c, g or t
  modified_base (1720576)..(1720577): a, c, g or t
  modified_base (1720652)..(1720663): a, c, g or t
  modified_base (1720666)..(1720668): a, c, g or t
  modified_base (1720670)..(1720670): a, c, g or t
  modified_base (1720836)..(1720877): a, c, g or t
  modified_base (1720916)..(1720968): a, c, g or t
  modified_base (1721021)..(1721061): a, c, g or t
  modified_base (1721082)..(1721082): a, c, g or t
  modified_base (1721099)..(1721102): a, c, g or t
  modified_base (1721140)..(1721157): a, c, g or t
  modified_base (1721162)..(1721163): a, c, g or t
  modified_base (1721184)..(1721184): a, c, g or t
  modified_base (1721202)..(1721396): a, c, g or t
  modified_base (1721420)..(1721422): a, c, g or t
  modified_base (1721426)..(1721426): a, c, g or t
  modified_base (1721428)..(1721497): a, c, g or t
  modified_base (1721540)..(1721564): a, c, g or t
  modified_base (1721575)..(1721576): a, c, g or t
  modified_base (1721602)..(1721650): a, c, g or t
  modified_base (1721654)..(1721655): a, c, g or t
  modified_base (1721669)..(1721717): a, c, g or t
  modified_base (1721758)..(1721759): a, c, g or t
  modified_base (1721763)..(1721764): a, c, g or t
  modified_base (1721767)..(1721776): a, c, g or t
  modified_base (1721784)..(1721784): a, c, g or t
  modified_base (1721786)..(1721787): a, c, g or t
  modified_base (1721807)..(1721850): a, c, g or t
  modified_base (1721876)..(1721984): a, c, g or t
  modified_base (1722068)..(1722068): a, c, g or t
  modified_base (1722079)..(1722132): a, c, g or t
  modified_base (1722145)..(1722145): a, c, g or t
  modified_base (1722154)..(1722154): a, c, g or t
  modified_base (1722156)..(1722207): a, c, g or t
  modified_base (1722219)..(1722219): a, c, g or t
  modified_base (1722244)..(1722297): a, c, g or t
  modified_base (1722326)..(1722326): a, c, g or t
  modified_base (1722329)..(1722329): a, c, g or t
  modified_base (1722410)..(1722413): a, c, g or t
  modified_base (1722458)..(1722458): a, c, g or t
  modified_base (1722478)..(1722479): a, c, g or t
  modified_base (1722481)..(1722481): a, c, g or t
  modified_base (1722484)..(1722496): a, c, g or t
  modified_base (1722618)..(1722623): a, c, g or t
  modified_base (1722710)..(1722751): a, c, g or t
  modified_base (1722899)..(1722899): a, c, g or t
  modified_base (1722905)..(1722905): a, c, g or t
  modified_base (1722907)..(1722948): a, c, g or t
  modified_base (1722963)..(1722963): a, c, g or t
  modified_base (1723400)..(1723401): a, c, g or t
  modified_base (1723403)..(1723403): a, c, g or t
  modified_base (1723405)..(1723409): a, c, g or t
  modified_base (1723438)..(1723441): a, c, g or t
  modified_base (1723585)..(1723612): a, c, g or t
  modified_base (1723615)..(1723616): a, c, g or t
  modified_base (1723649)..(1723651): a, c, g or t
  modified_base (1723844)..(1723844): a, c, g or t
  modified_base (1723850)..(1723850): a, c, g or t
  modified_base (1723853)..(1723858): a, c, g or t
  modified_base (1723886)..(1723886): a, c, g or t
  modified_base (1723973)..(1723973): a, c, g or t
  modified_base (1724027)..(1724030): a, c, g or t
  modified_base (1724057)..(1724057): a, c, g or t
  modified_base (1724060)..(1724142): a, c, g or t
  modified_base (1724167)..(1724167): a, c, g or t
  modified_base (1724184)..(1724185): a, c, g or t
  modified_base (1724190)..(1724191): a, c, g or t
  modified_base (1724193)..(1724261): a, c, g or t
  modified_base (1724263)..(1724263): a, c, g or t
  modified_base (1724271)..(1724271): a, c, g or t
  modified_base (1724292)..(1724292): a, c, g or t
  modified_base (1724305)..(1724305): a, c, g or t
  modified_base (1724383)..(1724383): a, c, g or t
  modified_base (1724482)..(1724482): a, c, g or t
  modified_base (1724568)..(1724568): a, c, g or t
  modified_base (1724574)..(1724615): a, c, g or t
  modified_base (1724674)..(1724719): a, c, g or t
  modified_base (1724733)..(1724733): a, c, g or t
  modified_base (1724745)..(1724745): a, c, g or t
  modified_base (1724748)..(1724748): a, c, g or t
  modified_base (1724970)..(1724970): a, c, g or t
  modified_base (1724996)..(1724999): a, c, g or t
  modified_base (1725006)..(1725006): a, c, g or t
  modified_base (1725142)..(1725142): a, c, g or t
  modified_base (1725155)..(1725195): a, c, g or t
  modified_base (1725300)..(1725356): a, c, g or t
  modified_base (1725360)..(1725363): a, c, g or t
  modified_base (1725532)..(1725572): a, c, g or t
  modified_base (1725593)..(1725634): a, c, g or t
  modified_base (1725642)..(1725642): a, c, g or t
  modified_base (1725647)..(1725647): a, c, g or t
  modified_base (1725676)..(1725717): a, c, g or t
  modified_base (1725797)..(1725797): a, c, g or t
  modified_base (1725998)..(1725998): a, c, g or t
  modified_base (1726013)..(1726013): a, c, g or t
  modified_base (1726016)..(1726016): a, c, g or t
  modified_base (1726124)..(1726169): a, c, g or t
  modified_base (1726214)..(1726214): a, c, g or t
  modified_base (1726231)..(1726232): a, c, g or t
  modified_base (1726234)..(1726279): a, c, g or t
  modified_base (1726281)..(1726281): a, c, g or t
  modified_base (1726326)..(1726326): a, c, g or t
  modified_base (1726332)..(1726332): a, c, g or t
  modified_base (1726365)..(1726365): a, c, g or t
  modified_base (1726419)..(1726419): a, c, g or t
  modified_base (1726461)..(1726503): a, c, g or t
  modified_base (1726525)..(1726525): a, c, g or t
  modified_base (1726539)..(1726542): a, c, g or t
  modified_base (1726579)..(1726579): a, c, g or t
  modified_base (1726594)..(1726594): a, c, g or t
  modified_base (1726596)..(1726597): a, c, g or t
  modified_base (1726669)..(1726669): a, c, g or t
  modified_base (1726686)..(1726727): a, c, g or t
  modified_base (1726780)..(1726780): a, c, g or t
  modified_base (1726843)..(1726885): a, c, g or t
  modified_base (1727024)..(1727068): a, c, g or t
  modified_base (1727076)..(1727078): a, c, g or t
  modified_base (1727123)..(1727162): a, c, g or t
  modified_base (1727188)..(1727190): a, c, g or t
  modified_base (1727192)..(1727198): a, c, g or t
  modified_base (1727997)..(1728040): a, c, g or t
  modified_base (1728092)..(1728142): a, c, g or t
  modified_base (1728345)..(1728345): a, c, g or t
  modified_base (1728352)..(1728394): a, c, g or t
  modified_base (1729055)..(1729101): a, c, g or t
  modified_base (1729106)..(1729107): a, c, g or t
  modified_base (1729118)..(1729118): a, c, g or t
  modified_base (1729125)..(1729247): a, c, g or t
  modified_base (1729334)..(1729375): a, c, g or t
  modified_base (1729400)..(1729437): a, c, g or t
  modified_base (1729457)..(1729497): a, c, g or t
  modified_base (1729627)..(1729627): a, c, g or t
  modified_base (1729871)..(1729875): a, c, g or t
  modified_base (1730030)..(1730030): a, c, g or t
  modified_base (1730039)..(1730039): a, c, g or t
  modified_base (1730041)..(1730042): a, c, g or t
  modified_base (1730046)..(1730046): a, c, g or t
  modified_base (1730393)..(1730393): a, c, g or t
  modified_base (1730396)..(1730396): a, c, g or t
  modified_base (1730403)..(1730406): a, c, g or t
  modified_base (1730509)..(1730509): a, c, g or t
  modified_base (1730973)..(1730973): a, c, g or t
  modified_base (1731592)..(1731593): a, c, g or t
  modified_base (1731985)..(1731985): a, c, g or t
  modified_base (1732375)..(1732375): a, c, g or t
  modified_base (1732378)..(1732378): a, c, g or t
  modified_base (1732544)..(1732544): a, c, g or t
  modified_base (1732570)..(1732573): a, c, g or t
  modified_base (1732581)..(1732581): a, c, g or t
  modified_base (1732913)..(1732913): a, c, g or t
  modified_base (1733050)..(1733050): a, c, g or t
  modified_base (1733063)..(1733063): a, c, g or t
  modified_base (1733084)..(1733084): a, c, g or t
  modified_base (1733088)..(1733088): a, c, g or t
  modified_base (1733189)..(1733189): a, c, g or t
  modified_base (1735459)..(1735459): a, c, g or t
  modified_base (1735585)..(1735585): a, c, g or t
  modified_base (1735712)..(1735712): a, c, g or t
  modified_base (1735895)..(1735895): a, c, g or t
  modified_base (1735940)..(1735940): a, c, g or t
  modified_base (1736132)..(1736132): a, c, g or t
  modified_base (1736158)..(1736165): a, c, g or t
  modified_base (1736263)..(1736263): a, c, g or t
  modified_base (1736303)..(1736315): a, c, g or t
  modified_base (1736352)..(1736352): a, c, g or t
  modified_base (1736547)..(1736547): a, c, g or t
  modified_base (1737058)..(1737058): a, c, g or t
  modified_base (1737133)..(1737133): a, c, g or t
  modified_base (1737178)..(1737178): a, c, g or t
  modified_base (1737189)..(1737189): a, c, g or t
  modified_base (1737201)..(1737204): a, c, g or t
  modified_base (1737314)..(1737318): a, c, g or t
  modified_base (1737330)..(1737330): a, c, g or t
  modified_base (1737452)..(1737452): a, c, g or t
  modified_base (1737497)..(1737497): a, c, g or t
  modified_base (1737831)..(1737831): a, c, g or t
  modified_base (1737875)..(1737875): a, c, g or t
  modified_base (1737894)..(1737894): a, c, g or t
  modified_base (1737935)..(1737935): a, c, g or t
  modified_base (1737956)..(1737974): a, c, g or t
  modified_base (1737992)..(1737993): a, c, g or t
  modified_base (1738001)..(1738002): a, c, g or t
  modified_base (1738006)..(1738006): a, c, g or t
  modified_base (1738071)..(1738071): a, c, g or t
  modified_base (1738083)..(1738083): a, c, g or t
  modified_base (1738125)..(1738125): a, c, g or t
  modified_base (1738138)..(1738138): a, c, g or t
  modified_base (1738156)..(1738156): a, c, g or t
  modified_base (1738194)..(1738194): a, c, g or t
  modified_base (1738281)..(1738281): a, c, g or t
  modified_base (1738370)..(1738370): a, c, g or t
  modified_base (1738376)..(1738376): a, c, g or t
  modified_base (1738441)..(1738441): a, c, g or t
  modified_base (1738462)..(1738463): a, c, g or t
  modified_base (1738465)..(1738467): a, c, g or t
  modified_base (1738528)..(1738528): a, c, g or t
  modified_base (1738543)..(1738543): a, c, g or t
  modified_base (1738596)..(1738596): a, c, g or t
  modified_base (1738686)..(1738686): a, c, g or t
  modified_base (1738698)..(1738698): a, c, g or t
  modified_base (1738726)..(1738726): a, c, g or t
  modified_base (1738780)..(1738835): a, c, g or t
  modified_base (1738863)..(1738918): a, c, g or t
  modified_base (1738922)..(1738923): a, c, g or t
  modified_base (1738927)..(1738928): a, c, g or t
  modified_base (1738964)..(1739004): a, c, g or t
  modified_base (1739026)..(1739068): a, c, g or t
  modified_base (1739070)..(1739071): a, c, g or t
  modified_base (1739090)..(1739096): a, c, g or t
  modified_base (1739126)..(1739126): a, c, g or t
  modified_base (1739181)..(1739224): a, c, g or t
  modified_base (1739233)..(1739233): a, c, g or t
  modified_base (1739280)..(1739280): a, c, g or t
  modified_base (1739283)..(1739283): a, c, g or t
  modified_base (1739322)..(1739322): a, c, g or t
  modified_base (1739364)..(1739364): a, c, g or t
  modified_base (1739484)..(1739484): a, c, g or t
  modified_base (1739488)..(1739499): a, c, g or t
  modified_base (1739507)..(1739510): a, c, g or t
  modified_base (1739553)..(1739553): a, c, g or t
  modified_base (1739610)..(1739610): a, c, g or t
  modified_base (1739613)..(1739613): a, c, g or t
  modified_base (1739628)..(1739628): a, c, g or t
  modified_base (1739633)..(1739633): a, c, g or t
  modified_base (1739661)..(1739661): a, c, g or t
  modified_base (1739757)..(1739763): a, c, g or t
  modified_base (1739812)..(1739909): a, c, g or t
  modified_base (1739934)..(1739976): a, c, g or t
  modified_base (1740136)..(1740136): a, c, g or t
  modified_base (1740187)..(1740204): a, c, g or t
  modified_base (1740238)..(1740238): a, c, g or t
  modified_base (1740343)..(1740343): a, c, g or t
  modified_base (1740410)..(1740410): a, c, g or t
  modified_base (1740413)..(1740452): a, c, g or t
  modified_base (1740454)..(1740454): a, c, g or t
  modified_base (1740599)..(1740640): a, c, g or t
  modified_base (1740661)..(1740664): a, c, g or t
  modified_base (1740735)..(1740735): a, c, g or t
  modified_base (1740756)..(1740756): a, c, g or t
  modified_base (1740761)..(1740764): a, c, g or t
  modified_base (1740766)..(1740783): a, c, g or t
  modified_base (1740865)..(1740904): a, c, g or t
  modified_base (1740907)..(1740908): a, c, g or t
  modified_base (1740987)..(1740987): a, c, g or t
  modified_base (1741043)..(1741043): a, c, g or t
  modified_base (1741048)..(1741051): a, c, g or t
  modified_base (1741060)..(1741101): a, c, g or t
  modified_base (1741147)..(1741150): a, c, g or t
  modified_base (1741157)..(1741213): a, c, g or t
  modified_base (1741240)..(1741240): a, c, g or t
  modified_base (1741254)..(1741257): a, c, g or t
  modified_base (1741262)..(1741265): a, c, g or t
  modified_base (1742333)..(1742334): a, c, g or t
  modified_base (1742457)..(1742472): a, c, g or t
  modified_base (1742479)..(1742480): a, c, g or t
  modified_base (1742515)..(1742528): a, c, g or t
  modified_base (1742535)..(1742536): a, c, g or t
  modified_base (1742543)..(1742543): a, c, g or t
  modified_base (1742548)..(1742551): a, c, g or t
  modified_base (1742782)..(1742794): a, c, g or t
  modified_base (1742816)..(1742820): a, c, g or t
  modified_base (1742921)..(1742968): a, c, g or t
  modified_base (1742986)..(1742987): a, c, g or t
  modified_base (1743043)..(1743043): a, c, g or t
  modified_base (1744467)..(1744468): a, c, g or t
  modified_base (1744503)..(1744504): a, c, g or t
  modified_base (1744509)..(1744510): a, c, g or t
  modified_base (1744545)..(1744545): a, c, g or t
  modified_base (1744550)..(1744551): a, c, g or t
  modified_base (1744590)..(1744598): a, c, g or t
  modified_base (1744750)..(1744751): a, c, g or t
  modified_base (1744759)..(1744769): a, c, g or t
  modified_base (1744778)..(1744779): a, c, g or t
  modified_base (1744934)..(1744936): a, c, g or t
  modified_base (1744965)..(1744978): a, c, g or t
  modified_base (1744985)..(1744986): a, c, g or t
  modified_base (1745043)..(1745060): a, c, g or t
  modified_base (1745084)..(1745084): a, c, g or t
  modified_base (1745133)..(1745152): a, c, g or t
  modified_base (1745440)..(1745441): a, c, g or t
  modified_base (1745512)..(1745514): a, c, g or t
  modified_base (1745516)..(1745522): a, c, g or t
  modified_base (1745524)..(1745525): a, c, g or t
  modified_base (1745561)..(1745572): a, c, g or t
  modified_base (1745923)..(1745923): a, c, g or t
  modified_base (1745942)..(1745943): a, c, g or t
  modified_base (1746578)..(1746586): a, c, g or t
  modified_base (1746591)..(1746592): a, c, g or t
  modified_base (1746607)..(1746646): a, c, g or t
  modified_base (1746662)..(1746665): a, c, g or t
  modified_base (1746668)..(1746668): a, c, g or t
  modified_base (1746670)..(1746671): a, c, g or t
  modified_base (1746683)..(1746684): a, c, g or t
  modified_base (1746693)..(1746761): a, c, g or t
  modified_base (1746763)..(1746764): a, c, g or t
  modified_base (1746767)..(1746768): a, c, g or t
  modified_base (1746772)..(1746773): a, c, g or t
  modified_base (1746844)..(1746845): a, c, g or t
  modified_base (1746849)..(1746850): a, c, g or t
  modified_base (1746905)..(1746906): a, c, g or t
  modified_base (1747030)..(1747031): a, c, g or t
  modified_base (1747042)..(1747050): a, c, g or t
  modified_base (1747205)..(1747238): a, c, g or t
  modified_base (1747329)..(1747428): a, c, g or t
  modified_base (1747470)..(1747500): a, c, g or t
  modified_base (1747524)..(1747615): a, c, g or t
  modified_base (1747641)..(1747642): a, c, g or t
  modified_base (1747667)..(1747675): a, c, g or t
  modified_base (1747699)..(1747742): a, c, g or t
  modified_base (1747764)..(1747765): a, c, g or t
  modified_base (1747777)..(1747777): a, c, g or t
  modified_base (1747792)..(1747808): a, c, g or t
  modified_base (1747832)..(1747833): a, c, g or t
  modified_base (1747857)..(1747864): a, c, g or t
  modified_base (1747866)..(1747867): a, c, g or t
  modified_base (1747897)..(1747900): a, c, g or t
  modified_base (1747904)..(1747905): a, c, g or t
  modified_base (1747944)..(1747945): a, c, g or t
  modified_base (1747947)..(1747948): a, c, g or t
  modified_base (1747954)..(1747978): a, c, g or t
  modified_base (1748023)..(1748024): a, c, g or t
  modified_base (1748027)..(1748028): a, c, g or t
  modified_base (1748065)..(1748075): a, c, g or t
  modified_base (1748077)..(1748078): a, c, g or t
  modified_base (1748087)..(1748088): a, c, g or t
  modified_base (1748124)..(1748125): a, c, g or t
  modified_base (1748128)..(1748149): a, c, g or t
  modified_base (1748194)..(1748222): a, c, g or t
  modified_base (1748226)..(1748227): a, c, g or t
  modified_base (1748233)..(1748234): a, c, g or t
  modified_base (1748281)..(1748285): a, c, g or t
  modified_base (1748302)..(1748311): a, c, g or t
  modified_base (1748353)..(1748397): a, c, g or t
  modified_base (1748417)..(1748418): a, c, g or t
  modified_base (1748420)..(1748424): a, c, g or t
  modified_base (1748447)..(1748450): a, c, g or t
  modified_base (1748452)..(1748493): a, c, g or t
  modified_base (1748516)..(1748531): a, c, g or t
  modified_base (1748543)..(1748543): a, c, g or t
  modified_base (1748551)..(1748597): a, c, g or t
  modified_base (1748609)..(1748610): a, c, g or t
  modified_base (1748617)..(1748821): a, c, g or t
  modified_base (1748841)..(1748960): a, c, g or t
  modified_base (1749006)..(1749045): a, c, g or t
  modified_base (1749065)..(1749065): a, c, g or t
  modified_base (1749073)..(1749116): a, c, g or t
  modified_base (1749129)..(1749133): a, c, g or t
  modified_base (1749139)..(1749178): a, c, g or t
  modified_base (1749238)..(1749238): a, c, g or t
  modified_base (1749262)..(1749262): a, c, g or t
  modified_base (1749292)..(1749624): a, c, g or t
  modified_base (1749626)..(1749626): a, c, g or t
  modified_base (1749638)..(1749638): a, c, g or t
  modified_base (1749647)..(1749758): a, c, g or t
  modified_base (1749779)..(1749884): a, c, g or t
  modified_base (1749899)..(1749899): a, c, g or t
  modified_base (1749902)..(1749902): a, c, g or t
  modified_base (1749914)..(1749914): a, c, g or t
  modified_base (1749953)..(1749995): a, c, g or t
  modified_base (1750018)..(1750058): a, c, g or t
  modified_base (1751114)..(1751115): a, c, g or t
  modified_base (1751120)..(1751121): a, c, g or t
  modified_base (1751871)..(1751899): a, c, g or t
  modified_base (1753723)..(1753723): a, c, g or t
  modified_base (1753823)..(1753823): a, c, g or t
  modified_base (1756231)..(1756232): a, c, g or t
  modified_base (1758435)..(1758440): a, c, g or t
  modified_base (1759960)..(1759971): a, c, g or t
  modified_base (1761443)..(1761443): a, c, g or t
  modified_base (1761504)..(1761507): a, c, g or t
  modified_base (1762415)..(1762418): a, c, g or t
  modified_base (1762496)..(1762496): a, c, g or t
  modified_base (1762548)..(1762548): a, c, g or t
  modified_base (1770520)..(1770520): a, c, g or t
  modified_base (1771506)..(1771509): a, c, g or t
  modified_base (1772684)..(1772684): a, c, g or t
  modified_base (1775665)..(1775665): a, c, g or t
  modified_base (1777211)..(1777211): a, c, g or t
  modified_base (1778448)..(1778448): a, c, g or t
  modified_base (1778474)..(1778474): a, c, g or t
  modified_base (1778708)..(1778708): a, c, g or t
  modified_base (1780570)..(1780571): a, c, g or t
  modified_base (1785668)..(1785668): a, c, g or t
  modified_base (1787149)..(1787149): a, c, g or t
  modified_base (1787153)..(1787156): a, c, g or t
  modified_base (1788861)..(1788861): a, c, g or t
  modified_base (1790320)..(1790320): a, c, g or t
  modified_base (1791784)..(1791788): a, c, g or t
  modified_base (1793265)..(1793265): a, c, g or t
  modified_base (1795305)..(1795305): a, c, g or t
  modified_base (1796078)..(1796082): a, c, g or t
  modified_base (1797138)..(1797138): a, c, g or t
  modified_base (1798179)..(1798179): a, c, g or t
  modified_base (1799564)..(1799564): a, c, g or t
  modified_base (1800663)..(1800663): a, c, g or t
  modified_base (1801061)..(1801064): a, c, g or t
  modified_base (1801384)..(1801389): a, c, g or t
  modified_base (1802481)..(1802481): a, c, g or t
  modified_base (1803077)..(1803077): a, c, g or t
  modified_base (1803299)..(1803299): a, c, g or t
  modified_base (1803504)..(1803504): a, c, g or t
  modified_base (1804236)..(1804236): a, c, g or t
  modified_base (1804263)..(1804263): a, c, g or t
  modified_base (1804949)..(1804949): a, c, g or t
  modified_base (1806612)..(1806612): a, c, g or t
  modified_base (1806798)..(1806801): a, c, g or t
  modified_base (1808311)..(1808312): a, c, g or t
  modified_base (1808649)..(1808649): a, c, g or t
  modified_base (1808693)..(1808693): a, c, g or t
  modified_base (1808844)..(1808856): a, c, g or t
  modified_base (1811152)..(1811152): a, c, g or t
  modified_base (1811613)..(1811627): a, c, g or t
  modified_base (1813382)..(1813382): a, c, g or t
  modified_base (1814805)..(1814805): a, c, g or t
  modified_base (1815824)..(1815827): a, c, g or t
  modified_base (1818434)..(1818435): a, c, g or t
  modified_base (1819630)..(1819630): a, c, g or t
  modified_base (1820185)..(1820185): a, c, g or t
  modified_base (1823073)..(1823076): a, c, g or t
  modified_base (1823155)..(1823155): a, c, g or t
  modified_base (1824453)..(1824453): a, c, g or t
  modified_base (1824515)..(1824515): a, c, g or t
  modified_base (1825126)..(1825126): a, c, g or t
  modified_base (1825417)..(1825426): a, c, g or t
  modified_base (1826311)..(1826311): a, c, g or t
  modified_base (1827543)..(1827543): a, c, g or t
  modified_base (1828933)..(1828936): a, c, g or t
  modified_base (1831571)..(1831574): a, c, g or t
  modified_base (1832122)..(1832124): a, c, g or t
  modified_base (1832838)..(1832838): a, c, g or t
  modified_base (1833855)..(1833855): a, c, g or t
  modified_base (1834035)..(1834037): a, c, g or t
  modified_base (1834064)..(1834067): a, c, g or t
  modified_base (1835485)..(1835486): a, c, g or t
  modified_base (1842814)..(1842814): a, c, g or t
  modified_base (1849436)..(1849436): a, c, g or t
  modified_base (1849546)..(1849551): a, c, g or t
  modified_base (1850015)..(1850020): a, c, g or t
  modified_base (1850343)..(1850343): a, c, g or t
  modified_base (1851329)..(1851329): a, c, g or t
  modified_base (1851379)..(1851382): a, c, g or t
  modified_base (1852962)..(1852962): a, c, g or t
  modified_base (1853342)..(1853342): a, c, g or t
  modified_base (1854049)..(1854049): a, c, g or t
  modified_base (1854929)..(1854929): a, c, g or t
  modified_base (1857199)..(1857199): a, c, g or t
  modified_base (1858480)..(1858519): a, c, g or t
  modified_base (1858943)..(1858946): a, c, g or t
  modified_base (1861350)..(1861351): a, c, g or t
  modified_base (1861375)..(1861375): a, c, g or t
  modified_base (1862258)..(1862259): a, c, g or t
  modified_base (1862263)..(1862264): a, c, g or t
  modified_base (1862271)..(1862288): a, c, g or t
  modified_base (1862967)..(1862967): a, c, g or t
  modified_base (1863018)..(1863018): a, c, g or t
  modified_base (1863029)..(1863029): a, c, g or t
  modified_base (1863233)..(1863233): a, c, g or t
  modified_base (1863405)..(1863405): a, c, g or t
  modified_base (1863519)..(1863521): a, c, g or t
  modified_base (1863549)..(1863554): a, c, g or t
  modified_base (1863559)..(1863559): a, c, g or t
  modified_base (1863587)..(1863626): a, c, g or t
  modified_base (1863719)..(1863767): a, c, g or t
  modified_base (1863851)..(1863891): a, c, g or t
  modified_base (1863915)..(1863920): a, c, g or t
  modified_base (1863932)..(1863971): a, c, g or t
  modified_base (1864060)..(1864060): a, c, g or t
  modified_base (1864156)..(1864195): a, c, g or t
  modified_base (1864223)..(1864228): a, c, g or t
  modified_base (1864234)..(1864238): a, c, g or t
  modified_base (1864269)..(1864331): a, c, g or t
  modified_base (1864341)..(1864341): a, c, g or t
  modified_base (1864405)..(1864451): a, c, g or t
  modified_base (1864473)..(1864631): a, c, g or t
  modified_base (1864655)..(1864677): a, c, g or t
  modified_base (1864692)..(1864695): a, c, g or t
  modified_base (1864701)..(1864725): a, c, g or t
  modified_base (1864752)..(1864792): a, c, g or t
  modified_base (1864795)..(1864796): a, c, g or t
  modified_base (1864921)..(1864921): a, c, g or t
  modified_base (1864927)..(1864928): a, c, g or t
  modified_base (1864933)..(1864934): a, c, g or t
  modified_base (1864970)..(1865016): a, c, g or t
  modified_base (1865028)..(1865029): a, c, g or t
  modified_base (1865040)..(1865043): a, c, g or t
  modified_base (1865066)..(1865067): a, c, g or t
  modified_base (1865093)..(1865132): a, c, g or t
  modified_base (1865170)..(1865170): a, c, g or t
  modified_base (1865172)..(1865210): a, c, g or t
  modified_base (1865298)..(1865348): a, c, g or t
  modified_base (1865398)..(1865544): a, c, g or t
  modified_base (1865567)..(1865626): a, c, g or t
  modified_base (1865641)..(1865641): a, c, g or t
  modified_base (1865652)..(1865676): a, c, g or t
  modified_base (1865704)..(1865744): a, c, g or t
  modified_base (1865769)..(1865772): a, c, g or t
  modified_base (1865794)..(1865833): a, c, g or t
  modified_base (1865845)..(1865845): a, c, g or t
  modified_base (1865900)..(1865900): a, c, g or t
  modified_base (1865917)..(1865917): a, c, g or t
  modified_base (1865929)..(1865929): a, c, g or t
  modified_base (1865938)..(1865938): a, c, g or t
  modified_base (1865985)..(1865985): a, c, g or t
  modified_base (1866030)..(1866030): a, c, g or t
  modified_base (1866035)..(1866102): a, c, g or t
  modified_base (1866167)..(1866168): a, c, g or t
  modified_base (1866171)..(1866172): a, c, g or t
  modified_base (1866178)..(1866252): a, c, g or t
  modified_base (1866271)..(1866275): a, c, g or t
  modified_base (1866282)..(1866304): a, c, g or t
  modified_base (1866333)..(1866428): a, c, g or t
  modified_base (1866449)..(1866523): a, c, g or t
  modified_base (1866540)..(1866543): a, c, g or t
  modified_base (1866639)..(1866641): a, c, g or t
  modified_base (1866693)..(1866693): a, c, g or t
  modified_base (1866712)..(1866712): a, c, g or t
  modified_base (1866742)..(1866782): a, c, g or t
  modified_base (1866785)..(1866785): a, c, g or t
  modified_base (1866839)..(1866891): a, c, g or t
  modified_base (1866937)..(1866962): a, c, g or t
  modified_base (1866964)..(1866967): a, c, g or t
  modified_base (1866998)..(1866998): a, c, g or t
  modified_base (1867000)..(1867047): a, c, g or t
  modified_base (1867071)..(1867156): a, c, g or t
  modified_base (1867173)..(1867174): a, c, g or t
  modified_base (1867179)..(1867239): a, c, g or t
  modified_base (1867255)..(1867255): a, c, g or t
  modified_base (1867263)..(1867323): a, c, g or t
  modified_base (1867347)..(1867365): a, c, g or t
  modified_base (1867370)..(1867371): a, c, g or t
  modified_base (1867399)..(1867400): a, c, g or t
  modified_base (1867403)..(1867622): a, c, g or t
  modified_base (1867649)..(1867654): a, c, g or t
  modified_base (1867680)..(1867680): a, c, g or t
  modified_base (1867682)..(1867683): a, c, g or t
  modified_base (1867736)..(1867948): a, c, g or t
  modified_base (1867972)..(1868043): a, c, g or t
  modified_base (1868067)..(1868068): a, c, g or t
  modified_base (1868100)..(1868174): a, c, g or t
  modified_base (1868186)..(1868187): a, c, g or t
  modified_base (1868204)..(1868205): a, c, g or t
  modified_base (1868211)..(1868319): a, c, g or t
  modified_base (1868342)..(1868385): a, c, g or t
  modified_base (1868407)..(1868407): a, c, g or t
  modified_base (1868433)..(1868511): a, c, g or t
  modified_base (1868532)..(1868590): a, c, g or t
  modified_base (1868635)..(1869460): a, c, g or t
  modified_base (1869494)..(1869495): a, c, g or t
  modified_base (1869500)..(1869559): a, c, g or t
  modified_base (1869581)..(1869582): a, c, g or t
  modified_base (1869586)..(1869587): a, c, g or t
  modified_base (1869590)..(1869590): a, c, g or t
  modified_base (1869596)..(1869596): a, c, g or t
  modified_base (1869606)..(1869674): a, c, g or t
  modified_base (1869979)..(1869980): a, c, g or t
  modified_base (1870059)..(1870059): a, c, g or t
  modified_base (1870073)..(1870075): a, c, g or t
  modified_base (1870077)..(1870080): a, c, g or t
  modified_base (1870083)..(1870084): a, c, g or t
  modified_base (1870266)..(1870266): a, c, g or t
  modified_base (1870554)..(1870554): a, c, g or t
  modified_base (1871221)..(1871223): a, c, g or t
  modified_base (1871566)..(1871567): a, c, g or t
  modified_base (1871574)..(1871581): a, c, g or t
  modified_base (1873259)..(1873260): a, c, g or t
  modified_base (1873264)..(1873265): a, c, g or t
  modified_base (1873611)..(1873649): a, c, g or t
  modified_base (1875372)..(1875409): a, c, g or t
  modified_base (1875462)..(1875471): a, c, g or t
  modified_base (1875587)..(1875588): a, c, g or t
  modified_base (1875676)..(1875722): a, c, g or t
  modified_base (1875801)..(1875842): a, c, g or t
  modified_base (1875864)..(1875880): a, c, g or t
  modified_base (1875904)..(1875993): a, c, g or t
  modified_base (1876020)..(1876033): a, c, g or t
  modified_base (1876035)..(1876036): a, c, g or t
  modified_base (1876044)..(1876045): a, c, g or t
  modified_base (1876057)..(1876061): a, c, g or t
  modified_base (1876092)..(1876095): a, c, g or t
  modified_base (1876107)..(1876108): a, c, g or t
  modified_base (1876121)..(1876122): a, c, g or t
  modified_base (1876125)..(1876126): a, c, g or t
  modified_base (1876128)..(1876129): a, c, g or t
  modified_base (1876197)..(1876237): a, c, g or t
  modified_base (1876325)..(1876328): a, c, g or t
  modified_base (1876330)..(1876331): a, c, g or t
  modified_base (1876355)..(1876359): a, c, g or t
  modified_base (1876430)..(1876431): a, c, g or t
  modified_base (1876443)..(1876474): a, c, g or t
  modified_base (1876630)..(1876648): a, c, g or t
  modified_base (1876702)..(1876702): a, c, g or t
  modified_base (1876737)..(1876738): a, c, g or t
  modified_base (1876744)..(1876750): a, c, g or t
  modified_base (1876753)..(1876757): a, c, g or t
  modified_base (1876759)..(1876760): a, c, g or t
  modified_base (1876771)..(1876817): a, c, g or t
  modified_base (1876853)..(1876874): a, c, g or t
  modified_base (1876935)..(1876936): a, c, g or t
  modified_base (1876938)..(1876939): a, c, g or t
  modified_base (1876951)..(1876980): a, c, g or t
  modified_base (1876991)..(1876992): a, c, g or t
  modified_base (1877018)..(1877018): a, c, g or t
  modified_base (1877034)..(1877035): a, c, g or t
  modified_base (1877042)..(1877042): a, c, g or t
  modified_base (1877049)..(1877050): a, c, g or t
  modified_base (1877052)..(1877070): a, c, g or t
  modified_base (1877091)..(1877092): a, c, g or t
  modified_base (1877094)..(1877113): a, c, g or t
  modified_base (1877129)..(1877130): a, c, g or t
  modified_base (1877134)..(1877135): a, c, g or t
  modified_base (1877137)..(1877161): a, c, g or t
  modified_base (1877172)..(1877173): a, c, g or t
  modified_base (1877186)..(1877186): a, c, g or t
  modified_base (1877266)..(1877269): a, c, g or t
  modified_base (1877319)..(1877320): a, c, g or t
  modified_base (1877332)..(1877333): a, c, g or t
  modified_base (1877393)..(1877409): a, c, g or t
  modified_base (1877412)..(1877415): a, c, g or t
  modified_base (1877441)..(1877467): a, c, g or t
  modified_base (1877762)..(1877763): a, c, g or t
  modified_base (1877869)..(1877878): a, c, g or t
  modified_base (1877881)..(1877882): a, c, g or t
  modified_base (1877894)..(1877895): a, c, g or t
  modified_base (1877927)..(1877928): a, c, g or t
  modified_base (1877992)..(1877993): a, c, g or t
  modified_base (1878044)..(1878045): a, c, g or t
  modified_base (1878047)..(1878085): a, c, g or t
  modified_base (1878096)..(1878097): a, c, g or t
  modified_base (1878109)..(1878120): a, c, g or t
  modified_base (1878129)..(1878130): a, c, g or t
  modified_base (1878136)..(1878137): a, c, g or t
  modified_base (1878146)..(1878179): a, c, g or t
  modified_base (1878325)..(1878326): a, c, g or t
  modified_base (1878328)..(1878338): a, c, g or t
  modified_base (1878341)..(1878342): a, c, g or t
  modified_base (1878366)..(1878411): a, c, g or t
  modified_base (1878428)..(1878429): a, c, g or t
  modified_base (1878436)..(1878437): a, c, g or t
  modified_base (1878439)..(1878440): a, c, g or t
  modified_base (1878444)..(1878445): a, c, g or t
  modified_base (1878502)..(1878517): a, c, g or t
  modified_base (1878541)..(1878554): a, c, g or t
  modified_base (1878582)..(1878689): a, c, g or t
  modified_base (1878693)..(1878694): a, c, g or t
  modified_base (1878713)..(1878724): a, c, g or t
  modified_base (1878727)..(1878727): a, c, g or t
  modified_base (1878790)..(1878795): a, c, g or t
  modified_base (1878874)..(1878874): a, c, g or t
  modified_base (1878917)..(1878917): a, c, g or t
  modified_base (1879077)..(1879087): a, c, g or t
  modified_base (1879097)..(1879098): a, c, g or t
  modified_base (1879185)..(1879189): a, c, g or t
  modified_base (1879253)..(1879253): a, c, g or t
  modified_base (1879350)..(1879376): a, c, g or t
  modified_base (1879459)..(1879460): a, c, g or t
  modified_base (1879560)..(1879572): a, c, g or t
  modified_base (1879577)..(1879579): a, c, g or t
  modified_base (1879596)..(1879599): a, c, g or t
  modified_base (1879729)..(1879748): a, c, g or t
  modified_base (1879861)..(1879861): a, c, g or t
  modified_base (1879931)..(1879995): a, c, g or t
  modified_base (1880040)..(1880085): a, c, g or t
  modified_base (1880161)..(1880161): a, c, g or t
  modified_base (1880193)..(1880235): a, c, g or t
  modified_base (1880362)..(1880429): a, c, g or t
  modified_base (1880558)..(1880620): a, c, g or t
  modified_base (1880638)..(1880638): a, c, g or t
  modified_base (1880646)..(1880649): a, c, g or t
  modified_base (1880691)..(1880730): a, c, g or t
  modified_base (1880755)..(1880757): a, c, g or t
  modified_base (1880787)..(1880788): a, c, g or t
  modified_base (1880805)..(1880805): a, c, g or t
  modified_base (1880809)..(1880810): a, c, g or t
  modified_base (1880812)..(1880913): a, c, g or t
  modified_base (1880939)..(1880991): a, c, g or t
  modified_base (1880994)..(1880995): a, c, g or t
  modified_base (1881020)..(1881020): a, c, g or t
  modified_base (1881106)..(1881107): a, c, g or t
  modified_base (1881111)..(1881114): a, c, g or t
  modified_base (1881117)..(1881118): a, c, g or t
  modified_base (1881121)..(1881148): a, c, g or t
  modified_base (1881152)..(1881152): a, c, g or t
  modified_base (1881182)..(1881194): a, c, g or t
  modified_base (1881246)..(1881252): a, c, g or t
  modified_base (1881300)..(1881353): a, c, g or t
  modified_base (1881379)..(1881380): a, c, g or t
  modified_base (1881383)..(1881482): a, c, g or t
  modified_base (1881531)..(1881569): a, c, g or t
  modified_base (1881587)..(1881588): a, c, g or t
  modified_base (1881615)..(1881617): a, c, g or t
  modified_base (1881650)..(1881693): a, c, g or t
  modified_base (1881695)..(1881700): a, c, g or t
  modified_base (1881755)..(1881800): a, c, g or t
  modified_base (1881811)..(1881811): a, c, g or t
  modified_base (1881823)..(1881823): a, c, g or t
  modified_base (1881832)..(1881852): a, c, g or t
  modified_base (1881862)..(1881862): a, c, g or t
  modified_base (1881903)..(1881908): a, c, g or t
  modified_base (1881916)..(1881916): a, c, g or t
  modified_base (1881937)..(1881939): a, c, g or t
  modified_base (1882020)..(1882023): a, c, g or t
  modified_base (1882047)..(1882050): a, c, g or t
  modified_base (1882141)..(1882161): a, c, g or t
  modified_base (1882267)..(1882320): a, c, g or t
  modified_base (1882326)..(1882327): a, c, g or t
  modified_base (1882331)..(1882334): a, c, g or t
  modified_base (1882336)..(1882339): a, c, g or t
  modified_base (1882341)..(1882342): a, c, g or t
  modified_base (1882344)..(1882393): a, c, g or t
  modified_base (1882418)..(1882467): a, c, g or t
  modified_base (1882522)..(1882524): a, c, g or t
  modified_base (1882548)..(1882548): a, c, g or t
  modified_base (1882558)..(1882578): a, c, g or t
  modified_base (1882585)..(1882588): a, c, g or t
  modified_base (1882602)..(1882624): a, c, g or t
  modified_base (1882649)..(1882652): a, c, g or t
  modified_base (1882654)..(1882654): a, c, g or t
  modified_base (1882692)..(1882692): a, c, g or t
  modified_base (1882698)..(1882698): a, c, g or t
  modified_base (1882740)..(1882740): a, c, g or t
  modified_base (1882764)..(1882764): a, c, g or t
  modified_base (1882768)..(1882831): a, c, g or t
  modified_base (1882834)..(1882834): a, c, g or t
  modified_base (1882877)..(1882882): a, c, g or t
  modified_base (1882885)..(1882886): a, c, g or t
  modified_base (1882944)..(1882985): a, c, g or t
  modified_base (1883032)..(1883077): a, c, g or t
  modified_base (1883108)..(1883108): a, c, g or t
  modified_base (1883110)..(1883160): a, c, g or t
  modified_base (1883203)..(1883204): a, c, g or t
  modified_base (1883230)..(1883265): a, c, g or t
  modified_base (1883332)..(1883359): a, c, g or t
  modified_base (1883383)..(1883448): a, c, g or t
  modified_base (1883450)..(1883451): a, c, g or t
  modified_base (1883455)..(1883456): a, c, g or t
  modified_base (1883475)..(1883475): a, c, g or t
  modified_base (1883509)..(1883512): a, c, g or t
  modified_base (1883526)..(1883527): a, c, g or t
  modified_base (1883533)..(1883601): a, c, g or t
  modified_base (1883619)..(1883619): a, c, g or t
  modified_base (1883622)..(1883622): a, c, g or t
  modified_base (1883624)..(1883668): a, c, g or t
  modified_base (1883694)..(1883717): a, c, g or t
  modified_base (1883720)..(1883721): a, c, g or t
  modified_base (1883733)..(1883734): a, c, g or t
  modified_base (1883741)..(1883742): a, c, g or t
  modified_base (1883758)..(1883825): a, c, g or t
  modified_base (1883859)..(1883860): a, c, g or t
  modified_base (1883871)..(1883888): a, c, g or t
  modified_base (1883922)..(1883923): a, c, g or t
  modified_base (1883929)..(1883971): a, c, g or t
  modified_base (1884060)..(1884061): a, c, g or t
  modified_base (1884067)..(1884118): a, c, g or t
  modified_base (1884150)..(1884254): a, c, g or t
  modified_base (1884301)..(1884302): a, c, g or t
  modified_base (1884312)..(1884313): a, c, g or t
  modified_base (1884338)..(1884342): a, c, g or t
  modified_base (1884448)..(1884510): a, c, g or t
  modified_base (1884512)..(1884513): a, c, g or t
  modified_base (1884530)..(1884545): a, c, g or t
  modified_base (1884549)..(1884551): a, c, g or t
  modified_base (1884645)..(1884754): a, c, g or t
  modified_base (1884756)..(1884756): a, c, g or t
  modified_base (1884776)..(1885045): a, c, g or t
  modified_base (1885049)..(1885050): a, c, g or t
  modified_base (1885072)..(1885084): a, c, g or t
  modified_base (1885124)..(1885174): a, c, g or t
  modified_base (1885197)..(1885213): a, c, g or t
  modified_base (1885235)..(1885236): a, c, g or t
  modified_base (1885238)..(1885242): a, c, g or t
  modified_base (1885256)..(1885257): a, c, g or t
  modified_base (1885261)..(1885262): a, c, g or t
  modified_base (1885266)..(1885328): a, c, g or t
  modified_base (1885358)..(1885461): a, c, g or t
  modified_base (1885485)..(1885504): a, c, g or t
  modified_base (1885543)..(1885544): a, c, g or t
  modified_base (1885547)..(1885548): a, c, g or t
  modified_base (1885560)..(1885609): a, c, g or t
  modified_base (1885634)..(1885677): a, c, g or t
  modified_base (1885842)..(1885843): a, c, g or t
  modified_base (1886801)..(1886803): a, c, g or t
  modified_base (1886806)..(1886807): a, c, g or t
  modified_base (1886827)..(1886830): a, c, g or t
  modified_base (1887490)..(1887491): a, c, g or t
  modified_base (1887690)..(1887691): a, c, g or t
  modified_base (1888862)..(1888863): a, c, g or t
  modified_base (1888869)..(1888875): a, c, g or t
  modified_base (1888877)..(1888878): a, c, g or t
  modified_base (1892916)..(1892916): a, c, g or t
  modified_base (1892987)..(1892988): a, c, g or t
  modified_base (1893061)..(1893067): a, c, g or t
  modified_base (1893966)..(1893966): a, c, g or t
  modified_base (1894832)..(1894833): a, c, g or t
  modified_base (1895610)..(1895610): a, c, g or t
  modified_base (1896471)..(1896472): a, c, g or t
  modified_base (1896474)..(1896475): a, c, g or t
  modified_base (1896745)..(1896746): a, c, g or t
  modified_base (1896815)..(1896816): a, c, g or t
  modified_base (1898355)..(1898355): a, c, g or t
  modified_base (1898419)..(1898420): a, c, g or t
  modified_base (1898479)..(1898510): a, c, g or t
  modified_base (1898514)..(1898514): a, c, g or t
  modified_base (1898523)..(1898523): a, c, g or t
  modified_base (1898578)..(1898578): a, c, g or t
  modified_base (1898713)..(1898713): a, c, g or t
  modified_base (1898747)..(1898747): a, c, g or t
  modified_base (1898772)..(1898813): a, c, g or t
  modified_base (1898817)..(1898817): a, c, g or t
  modified_base (1898870)..(1898915): a, c, g or t
  modified_base (1898940)..(1898943): a, c, g or t
  modified_base (1898962)..(1898963): a, c, g or t
  modified_base (1898965)..(1899004): a, c, g or t
  modified_base (1899140)..(1899141): a, c, g or t
  modified_base (1899145)..(1899200): a, c, g or t
  modified_base (1899458)..(1899500): a, c, g or t
  modified_base (1899560)..(1899562): a, c, g or t
  modified_base (1899564)..(1899606): a, c, g or t
  modified_base (1899651)..(1899705): a, c, g or t
  modified_base (1899737)..(1899737): a, c, g or t
  modified_base (1899740)..(1899740): a, c, g or t
  modified_base (1899746)..(1899746): a, c, g or t
  modified_base (1899748)..(1899788): a, c, g or t
  modified_base (1899790)..(1899791): a, c, g or t
  modified_base (1899813)..(1899853): a, c, g or t
  modified_base (1899855)..(1899856): a, c, g or t
  modified_base (1899894)..(1899898): a, c, g or t
  modified_base (1899901)..(1899956): a, c, g or t
  modified_base (1899980)..(1900019): a, c, g or t
  modified_base (1900046)..(1900091): a, c, g or t
  modified_base (1900146)..(1900146): a, c, g or t
  modified_base (1900154)..(1900156): a, c, g or t
  modified_base (1900162)..(1900162): a, c, g or t
  modified_base (1900197)..(1900197): a, c, g or t
  modified_base (1900223)..(1900223): a, c, g or t
  modified_base (1900288)..(1900297): a, c, g or t
  modified_base (1900347)..(1900350): a, c, g or t
  modified_base (1900420)..(1900462): a, c, g or t
  modified_base (1900569)..(1900569): a, c, g or t
  modified_base (1900620)..(1900621): a, c, g or t
  modified_base (1900686)..(1900687): a, c, g or t
  modified_base (1900691)..(1900691): a, c, g or t
  modified_base (1900695)..(1900696): a, c, g or t
  modified_base (1900707)..(1900707): a, c, g or t
  modified_base (1900759)..(1900760): a, c, g or t
  modified_base (1900762)..(1900805): a, c, g or t
  modified_base (1900807)..(1900808): a, c, g or t
  modified_base (1900836)..(1900837): a, c, g or t
  modified_base (1900891)..(1900891): a, c, g or t
  modified_base (1900893)..(1900947): a, c, g or t
  modified_base (1901012)..(1901057): a, c, g or t
  modified_base (1901090)..(1901156): a, c, g or t
  modified_base (1901216)..(1901259): a, c, g or t
  modified_base (1901267)..(1901268): a, c, g or t
  modified_base (1901276)..(1901277): a, c, g or t
  modified_base (1901301)..(1901346): a, c, g or t
  modified_base (1901350)..(1901351): a, c, g or t
  modified_base (1901357)..(1901358): a, c, g or t
  modified_base (1901388)..(1901388): a, c, g or t
  modified_base (1901475)..(1901478): a, c, g or t
  modified_base (1901481)..(1901527): a, c, g or t
  modified_base (1901546)..(1901583): a, c, g or t
  modified_base (1901604)..(1901655): a, c, g or t
  modified_base (1901683)..(1901690): a, c, g or t
  modified_base (1901698)..(1901698): a, c, g or t
  modified_base (1901714)..(1901731): a, c, g or t
  modified_base (1901771)..(1901772): a, c, g or t
  modified_base (1901776)..(1901776): a, c, g or t
  modified_base (1901783)..(1901825): a, c, g or t
  modified_base (1901846)..(1901861): a, c, g or t
  modified_base (1901892)..(1901950): a, c, g or t
  modified_base (1901986)..(1901987): a, c, g or t
  modified_base (1901989)..(1901990): a, c, g or t
  modified_base (1901994)..(1901995): a, c, g or t
  modified_base (1901997)..(1902011): a, c, g or t
  modified_base (1902042)..(1902043): a, c, g or t
  modified_base (1902059)..(1902060): a, c, g or t
  modified_base (1902064)..(1902086): a, c, g or t
  modified_base (1902109)..(1902114): a, c, g or t
  modified_base (1902139)..(1902152): a, c, g or t
  modified_base (1902186)..(1902186): a, c, g or t
  modified_base (1902189)..(1902192): a, c, g or t
  modified_base (1902226)..(1902227): a, c, g or t
  modified_base (1902267)..(1902270): a, c, g or t
  modified_base (1902274)..(1902276): a, c, g or t
  modified_base (1902299)..(1902338): a, c, g or t
  modified_base (1902363)..(1902363): a, c, g or t
  modified_base (1902372)..(1902382): a, c, g or t
  modified_base (1902423)..(1902485): a, c, g or t
  modified_base (1902639)..(1902727): a, c, g or t
  modified_base (1902729)..(1902732): a, c, g or t
  modified_base (1902752)..(1902752): a, c, g or t
  modified_base (1902758)..(1903198): a, c, g or t
  modified_base (1903206)..(1903206): a, c, g or t
  modified_base (1903216)..(1903217): a, c, g or t
  modified_base (1903222)..(1903238): a, c, g or t
  modified_base (1903249)..(1903249): a, c, g or t
  modified_base (1903275)..(1903342): a, c, g or t
  modified_base (1903376)..(1903382): a, c, g or t
  modified_base (1903413)..(1903425): a, c, g or t
  modified_base (1903436)..(1903437): a, c, g or t
  modified_base (1903469)..(1903470): a, c, g or t
  modified_base (1903474)..(1903477): a, c, g or t
  modified_base (1903501)..(1903545): a, c, g or t
  modified_base (1903558)..(1903559): a, c, g or t
  modified_base (1903563)..(1903564): a, c, g or t
  modified_base (1903569)..(1903587): a, c, g or t
  modified_base (1903617)..(1903618): a, c, g or t
  modified_base (1903622)..(1903694): a, c, g or t
  modified_base (1903703)..(1903703): a, c, g or t
  modified_base (1903723)..(1903929): a, c, g or t
  modified_base (1903967)..(1904008): a, c, g or t
  modified_base (1904029)..(1904066): a, c, g or t
  modified_base (1904103)..(1904106): a, c, g or t
  modified_base (1904112)..(1904128): a, c, g or t
  modified_base (1904131)..(1904133): a, c, g or t
  modified_base (1904138)..(1904139): a, c, g or t
  modified_base (1904152)..(1904194): a, c, g or t
  modified_base (1904234)..(1904238): a, c, g or t
  modified_base (1904257)..(1904257): a, c, g or t
  modified_base (1904259)..(1905326): a, c, g or t
  modified_base (1905360)..(1905950): a, c, g or t
  modified_base (1905965)..(1905965): a, c, g or t
  modified_base (1905969)..(1905971): a, c, g or t
  modified_base (1905974)..(1906386): a, c, g or t
  modified_base (1906389)..(1906390): a, c, g or t
  modified_base (1906410)..(1906625): a, c, g or t
  modified_base (1906648)..(1906687): a, c, g or t
  modified_base (1906689)..(1906690): a, c, g or t
  modified_base (1906714)..(1906755): a, c, g or t
  modified_base (1906841)..(1906938): a, c, g or t
  modified_base (1906976)..(1907024): a, c, g or t
  modified_base (1907966)..(1907966): a, c, g or t
  modified_base (1907968)..(1907969): a, c, g or t
  modified_base (1908152)..(1908156): a, c, g or t
  modified_base (1908288)..(1908556): a, c, g or t
  modified_base (1908583)..(1908638): a, c, g or t
  modified_base (1908709)..(1908722): a, c, g or t
  modified_base (1908772)..(1908773): a, c, g or t
  modified_base (1908847)..(1908893): a, c, g or t
  modified_base (1910200)..(1910200): a, c, g or t
  modified_base (1910202)..(1910203): a, c, g or t
  modified_base (1910207)..(1910207): a, c, g or t
  modified_base (1910435)..(1910436): a, c, g or t
  modified_base (1910440)..(1910441): a, c, g or t
  modified_base (1910443)..(1910448): a, c, g or t
  modified_base (1910519)..(1910519): a, c, g or t
  modified_base (1910653)..(1910653): a, c, g or t
  modified_base (1910870)..(1910870): a, c, g or t
  modified_base (1910877)..(1910878): a, c, g or t
  modified_base (1911157)..(1911157): a, c, g or t
  modified_base (1911212)..(1911212): a, c, g or t
  modified_base (1911219)..(1911219): a, c, g or t
  modified_base (1911426)..(1911478): a, c, g or t
  modified_base (1911540)..(1911542): a, c, g or t
  modified_base (1911547)..(1911579): a, c, g or t
  modified_base (1911582)..(1911583): a, c, g or t
  modified_base (1911635)..(1911651): a, c, g or t
  modified_base (1911657)..(1911657): a, c, g or t
  modified_base (1911677)..(1911678): a, c, g or t
  modified_base (1911682)..(1911691): a, c, g or t
  modified_base (1911711)..(1911711): a, c, g or t
  modified_base (1911796)..(1911796): a, c, g or t
  modified_base (1911798)..(1911835): a, c, g or t
  modified_base (1911864)..(1911864): a, c, g or t
  modified_base (1911874)..(1911913): a, c, g or t
  modified_base (1912005)..(1912005): a, c, g or t
  modified_base (1912023)..(1912023): a, c, g or t
  modified_base (1912032)..(1912050): a, c, g or t
  modified_base (1912065)..(1912065): a, c, g or t
  modified_base (1912316)..(1912355): a, c, g or t
  modified_base (1912581)..(1912633): a, c, g or t
  modified_base (1912658)..(1912666): a, c, g or t
  modified_base (1912713)..(1912713): a, c, g or t
  modified_base (1912965)..(1912972): a, c, g or t
  modified_base (1912981)..(1912982): a, c, g or t
  modified_base (1912984)..(1912985): a, c, g or t
  modified_base (1913019)..(1913153): a, c, g or t
  modified_base (1913205)..(1913208): a, c, g or t
  modified_base (1913211)..(1913216): a, c, g or t
  modified_base (1913224)..(1913224): a, c, g or t
  modified_base (1913233)..(1913233): a, c, g or t
  modified_base (1913240)..(1913335): a, c, g or t
  modified_base (1913381)..(1913381): a, c, g or t
  modified_base (1913384)..(1913384): a, c, g or t
  modified_base (1913402)..(1913402): a, c, g or t
  modified_base (1913408)..(1913408): a, c, g or t
  modified_base (1913413)..(1913416): a, c, g or t
  modified_base (1913643)..(1913651): a, c, g or t
  modified_base (1913712)..(1913714): a, c, g or t
  modified_base (1913729)..(1913732): a, c, g or t
  modified_base (1913752)..(1913754): a, c, g or t
  modified_base (1913760)..(1913824): a, c, g or t
  modified_base (1913826)..(1913827): a, c, g or t
  modified_base (1913831)..(1913832): a, c, g or t
  modified_base (1913836)..(1913837): a, c, g or t
  modified_base (1913848)..(1914118): a, c, g or t
  modified_base (1914147)..(1914148): a, c, g or t
  modified_base (1914150)..(1914150): a, c, g or t
  modified_base (1914155)..(1914212): a, c, g or t
  modified_base (1914216)..(1914217): a, c, g or t
  modified_base (1914262)..(1914306): a, c, g or t
  modified_base (1914370)..(1914412): a, c, g or t
  modified_base (1914549)..(1914580): a, c, g or t
  modified_base (1914582)..(1914588): a, c, g or t
  modified_base (1914685)..(1914724): a, c, g or t
  modified_base (1914765)..(1914808): a, c, g or t
  modified_base (1914905)..(1914955): a, c, g or t
  modified_base (1915027)..(1915027): a, c, g or t
  modified_base (1915044)..(1915097): a, c, g or t
  modified_base (1915122)..(1915122): a, c, g or t
  modified_base (1915131)..(1915193): a, c, g or t
  modified_base (1915249)..(1915249): a, c, g or t
  modified_base (1915257)..(1915257): a, c, g or t
  modified_base (1915271)..(1915272): a, c, g or t
  modified_base (1915274)..(1915275): a, c, g or t
  modified_base (1915314)..(1915314): a, c, g or t
  modified_base (1915326)..(1915326): a, c, g or t
  modified_base (1915336)..(1915395): a, c, g or t
  modified_base (1915571)..(1915610): a, c, g or t
  modified_base (1915668)..(1915671): a, c, g or t
  modified_base (1916391)..(1916393): a, c, g or t
  modified_base (1916741)..(1916744): a, c, g or t
  modified_base (1916800)..(1916803): a, c, g or t
  modified_base (1916807)..(1916812): a, c, g or t
  modified_base (1918374)..(1918396): a, c, g or t
  modified_base (1919970)..(1919970): a, c, g or t
  modified_base (1922079)..(1922079): a, c, g or t
  modified_base (1922773)..(1922773): a, c, g or t
  modified_base (1923278)..(1923278): a, c, g or t
  modified_base (1923294)..(1923294): a, c, g or t
  modified_base (1923688)..(1923691): a, c, g or t
  modified_base (1923693)..(1923693): a, c, g or t
  modified_base (1925034)..(1925034): a, c, g or t
  modified_base (1925158)..(1925158): a, c, g or t
  modified_base (1925509)..(1925509): a, c, g or t
  modified_base (1925519)..(1925519): a, c, g or t
  modified_base (1926135)..(1926135): a, c, g or t
  modified_base (1930797)..(1930797): a, c, g or t
  modified_base (1932065)..(1932065): a, c, g or t
  modified_base (1932069)..(1932069): a, c, g or t
  modified_base (1933146)..(1933146): a, c, g or t
  modified_base (1933894)..(1933897): a, c, g or t
  modified_base (1934142)..(1934142): a, c, g or t
  modified_base (1934929)..(1934929): a, c, g or t
  modified_base (1939745)..(1939745): a, c, g or t
  modified_base (1940003)..(1940003): a, c, g or t
  modified_base (1944609)..(1944612): a, c, g or t
  modified_base (1945791)..(1945791): a, c, g or t
  modified_base (1948308)..(1948308): a, c, g or t
  modified_base (1949533)..(1949542): a, c, g or t
  modified_base (1955568)..(1955571): a, c, g or t
  modified_base (1955740)..(1955740): a, c, g or t
  modified_base (1957359)..(1957360): a, c, g or t
  modified_base (1957781)..(1957781): a, c, g or t
  modified_base (1959244)..(1959244): a, c, g or t
  modified_base (1959979)..(1959979): a, c, g or t
  modified_base (1960483)..(1960483): a, c, g or t
  modified_base (1962389)..(1962393): a, c, g or t
  modified_base (1964609)..(1964620): a, c, g or t
  modified_base (1965941)..(1965949): a, c, g or t
  modified_base (1966522)..(1966522): a, c, g or t
  modified_base (1966535)..(1966535): a, c, g or t
  modified_base (1966575)..(1966575): a, c, g or t
  modified_base (1967687)..(1967687): a, c, g or t
  modified_base (1968902)..(1968902): a, c, g or t
  modified_base (1968982)..(1968983): a, c, g or t
  modified_base (1968988)..(1969035): a, c, g or t
  modified_base (1969044)..(1969045): a, c, g or t
  modified_base (1969061)..(1969061): a, c, g or t
  modified_base (1971407)..(1971415): a, c, g or t
  modified_base (1972009)..(1972009): a, c, g or t
  modified_base (1976023)..(1976023): a, c, g or t
  modified_base (1976368)..(1976368): a, c, g or t
  modified_base (1977460)..(1977463): a, c, g or t
  modified_base (1979314)..(1979314): a, c, g or t
  modified_base (1980140)..(1980140): a, c, g or t
  modified_base (1981161)..(1981161): a, c, g or t
  modified_base (1981167)..(1981167): a, c, g or t
  modified_base (1981171)..(1981172): a, c, g or t
  modified_base (1983043)..(1983050): a, c, g or t
  modified_base (1986727)..(1986727): a, c, g or t
  modified_base (1986911)..(1986911): a, c, g or t
  modified_base (1988760)..(1988765): a, c, g or t
  modified_base (1989803)..(1989806): a, c, g or t
  modified_base (1990709)..(1990712): a, c, g or t
  modified_base (1991331)..(1991336): a, c, g or t
  modified_base (1991518)..(1991518): a, c, g or t
  modified_base (1991650)..(1991665): a, c, g or t
  modified_base (1999423)..(1999423): a, c, g or t
  modified_base (2000437)..(2000437): a, c, g or t
  modified_base (2002908)..(2002908): a, c, g or t
  modified_base (2003541)..(2003552): a, c, g or t
  modified_base (2004758)..(2004758): a, c, g or t
  modified_base (2009811)..(2009811): a, c, g or t
  modified_base (2010088)..(2010088): a, c, g or t
  modified_base (2013727)..(2013728): a, c, g or t
  modified_base (2013730)..(2013737): a, c, g or t
  modified_base (2014997)..(2015005): a, c, g or t
  modified_base (2015013)..(2015014): a, c, g or t
  modified_base (2018574)..(2018574): a, c, g or t
  modified_base (2018659)..(2018659): a, c, g or t
  modified_base (2018867)..(2018867): a, c, g or t
  modified_base (2023451)..(2023451): a, c, g or t
  modified_base (2024979)..(2024979): a, c, g or t
  modified_base (2026344)..(2026344): a, c, g or t
  modified_base (2026715)..(2026718): a, c, g or t
  modified_base (2029903)..(2029903): a, c, g or t
  modified_base (2029905)..(2029905): a, c, g or t
  modified_base (2029907)..(2029910): a, c, g or t
  modified_base (2032385)..(2032388): a, c, g or t
  modified_base (2035316)..(2035316): a, c, g or t
  modified_base (2037024)..(2037024): a, c, g or t
  modified_base (2038331)..(2038331): a, c, g or t
  modified_base (2038434)..(2038437): a, c, g or t
  modified_base (2038920)..(2038928): a, c, g or t
  modified_base (2039676)..(2039677): a, c, g or t
  modified_base (2039684)..(2039684): a, c, g or t
  modified_base (2044254)..(2044254): a, c, g or t
  modified_base (2046544)..(2046544): a, c, g or t
  modified_base (2048030)..(2048030): a, c, g or t
  modified_base (2048032)..(2048033): a, c, g or t
  modified_base (2051293)..(2051293): a, c, g or t
  modified_base (2052035)..(2052035): a, c, g or t
  modified_base (2055437)..(2055437): a, c, g or t
  modified_base (2055458)..(2055458): a, c, g or t
  modified_base (2055831)..(2055831): a, c, g or t
  modified_base (2059352)..(2059352): a, c, g or t
  modified_base (2059907)..(2059907): a, c, g or t
  modified_base (2059910)..(2059910): a, c, g or t
  modified_base (2060096)..(2060096): a, c, g or t
  modified_base (2062080)..(2062084): a, c, g or t
  modified_base (2063403)..(2063403): a, c, g or t
  modified_base (2063973)..(2063973): a, c, g or t
  modified_base (2064779)..(2064779): a, c, g or t
  modified_base (2066138)..(2066138): a, c, g or t
  modified_base (2066468)..(2066476): a, c, g or t
  modified_base (2066478)..(2066478): a, c, g or t
  modified_base (2067699)..(2067699): a, c, g or t
  modified_base (2067719)..(2067719): a, c, g or t
  modified_base (2068557)..(2068557): a, c, g or t
  modified_base (2068560)..(2068560): a, c, g or t
  modified_base (2069151)..(2069151): a, c, g or t
  modified_base (2071494)..(2071494): a, c, g or t
  modified_base (2073284)..(2073284): a, c, g or t
  modified_base (2073355)..(2073358): a, c, g or t
  modified_base (2075930)..(2075930): a, c, g or t
  modified_base (2076369)..(2076369): a, c, g or t
  modified_base (2081054)..(2081054): a, c, g or t
  modified_base (2081251)..(2081251): a, c, g or t
  modified_base (2082102)..(2082102): a, c, g or t
  modified_base (2083340)..(2083341): a, c, g or t
  modified_base (2084084)..(2084084): a, c, g or t
  modified_base (2084149)..(2084149): a, c, g or t
  modified_base (2084342)..(2084342): a, c, g or t
  modified_base (2084606)..(2084606): a, c, g or t
  modified_base (2086932)..(2086932): a, c, g or t
  modified_base (2086942)..(2086942): a, c, g or t
  modified_base (2087806)..(2087811): a, c, g or t
  modified_base (2088359)..(2088359): a, c, g or t
  modified_base (2089458)..(2089458): a, c, g or t
  modified_base (2089587)..(2089587): a, c, g or t
  modified_base (2090696)..(2090700): a, c, g or t
  modified_base (2090742)..(2090742): a, c, g or t
  modified_base (2091649)..(2091649): a, c, g or t
  modified_base (2094334)..(2094334): a, c, g or t
  modified_base (2095507)..(2095507): a, c, g or t
  modified_base (2095578)..(2095578): a, c, g or t
  modified_base (2096591)..(2096591): a, c, g or t
  modified_base (2096709)..(2096712): a, c, g or t
  modified_base (2096890)..(2096891): a, c, g or t
  modified_base (2096893)..(2096903): a, c, g or t
  modified_base (2096908)..(2096908): a, c, g or t
  modified_base (2097012)..(2097012): a, c, g or t
  modified_base (2101172)..(2101172): a, c, g or t
  modified_base (2103737)..(2103737): a, c, g or t
  modified_base (2104737)..(2104737): a, c, g or t
  modified_base (2105664)..(2105664): a, c, g or t
  modified_base (2108892)..(2108892): a, c, g or t
  modified_base (2110162)..(2110162): a, c, g or t
  modified_base (2110602)..(2110602): a, c, g or t
  modified_base (2112134)..(2112134): a, c, g or t
  modified_base (2112164)..(2112164): a, c, g or t
  modified_base (2112214)..(2112214): a, c, g or t
  modified_base (2114321)..(2114326): a, c, g or t
  modified_base (2114362)..(2114362): a, c, g or t
  modified_base (2114702)..(2114703): a, c, g or t
  modified_base (2114706)..(2114712): a, c, g or t
  modified_base (2114811)..(2114812): a, c, g or t
  modified_base (2114823)..(2114954): a, c, g or t
  modified_base (2114959)..(2114959): a, c, g or t
  modified_base (2114996)..(2114997): a, c, g or t
  modified_base (2115027)..(2115028): a, c, g or t
  modified_base (2115061)..(2115096): a, c, g or t
  modified_base (2115098)..(2115099): a, c, g or t
  modified_base (2115712)..(2115717): a, c, g or t
  modified_base (2119382)..(2119382): a, c, g or t
  modified_base (2119846)..(2119846): a, c, g or t
  modified_base (2120341)..(2120342): a, c, g or t
  modified_base (2120347)..(2120352): a, c, g or t
  modified_base (2120354)..(2120355): a, c, g or t
  modified_base (2120736)..(2120740): a, c, g or t
  modified_base (2120899)..(2120900): a, c, g or t
  modified_base (2121777)..(2121777): a, c, g or t
  modified_base (2121964)..(2121967): a, c, g or t
  modified_base (2123638)..(2123643): a, c, g or t
  modified_base (2124069)..(2124069): a, c, g or t
  modified_base (2124123)..(2124123): a, c, g or t
  modified_base (2124336)..(2124336): a, c, g or t
  modified_base (2129186)..(2129186): a, c, g or t
  modified_base (2129786)..(2129789): a, c, g or t
  modified_base (2130807)..(2130807): a, c, g or t
  modified_base (2131544)..(2131549): a, c, g or t
  modified_base (2132117)..(2132117): a, c, g or t
  modified_base (2132147)..(2132147): a, c, g or t
  modified_base (2134318)..(2134320): a, c, g or t
  modified_base (2134553)..(2134560): a, c, g or t
  modified_base (2135962)..(2135962): a, c, g or t
  modified_base (2135995)..(2135995): a, c, g or t
  modified_base (2136511)..(2136524): a, c, g or t
  modified_base (2136527)..(2136527): a, c, g or t
  modified_base (2140633)..(2140633): a, c, g or t
  modified_base (2140690)..(2140690): a, c, g or t
  modified_base (2140693)..(2140693): a, c, g or t
  modified_base (2140943)..(2140943): a, c, g or t
  modified_base (2140977)..(2140977): a, c, g or t
  modified_base (2141554)..(2141558): a, c, g or t
  modified_base (2143325)..(2143325): a, c, g or t
  modified_base (2143601)..(2143601): a, c, g or t
  modified_base (2144414)..(2144414): a, c, g or t
  modified_base (2147332)..(2147337): a, c, g or t
  modified_base (2147339)..(2147341): a, c, g or t
  modified_base (2147976)..(2147980): a, c, g or t
  modified_base (2148303)..(2148303): a, c, g or t
  modified_base (2148477)..(2148477): a, c, g or t
  modified_base (2149841)..(2149841): a, c, g or t
  modified_base (2151535)..(2151535): a, c, g or t
  modified_base (2151589)..(2151592): a, c, g or t
  modified_base (2154321)..(2154321): a, c, g or t
  modified_base (2156144)..(2156144): a, c, g or t
  modified_base (2156147)..(2156156): a, c, g or t
  modified_base (2156160)..(2156160): a, c, g or t
  modified_base (2156163)..(2156163): a, c, g or t
  modified_base (2156562)..(2156562): a, c, g or t
  modified_base (2157923)..(2157923): a, c, g or t
  modified_base (2158164)..(2158164): a, c, g or t
  modified_base (2159069)..(2159069): a, c, g or t
  modified_base (2161121)..(2161121): a, c, g or t
  modified_base (2161179)..(2161179): a, c, g or t
  modified_base (2162418)..(2162421): a, c, g or t
  modified_base (2162454)..(2162454): a, c, g or t
  modified_base (2162525)..(2162528): a, c, g or t
  modified_base (2162531)..(2162531): a, c, g or t
  modified_base (2162534)..(2162544): a, c, g or t
  modified_base (2162854)..(2162854): a, c, g or t
  modified_base (2162933)..(2162933): a, c, g or t
  modified_base (2165297)..(2165297): a, c, g or t
  modified_base (2166706)..(2166706): a, c, g or t
  modified_base (2167524)..(2167524): a, c, g or t
  modified_base (2167580)..(2167580): a, c, g or t
  modified_base (2168833)..(2168833): a, c, g or t
  modified_base (2170269)..(2170269): a, c, g or t
  modified_base (2170643)..(2170643): a, c, g or t
  modified_base (2170649)..(2170649): a, c, g or t
  modified_base (2171637)..(2171637): a, c, g or t
  modified_base (2172230)..(2172230): a, c, g or t
  modified_base (2175366)..(2175367): a, c, g or t
  modified_base (2175370)..(2175371): a, c, g or t
  modified_base (2176248)..(2176248): a, c, g or t
  modified_base (2176611)..(2176615): a, c, g or t
  modified_base (2176753)..(2176753): a, c, g or t
  modified_base (2176926)..(2176926): a, c, g or t
  modified_base (2177955)..(2177955): a, c, g or t
  modified_base (2178735)..(2178735): a, c, g or t
  modified_base (2180395)..(2180395): a, c, g or t
  modified_base (2180650)..(2180653): a, c, g or t
  modified_base (2184448)..(2184448): a, c, g or t
  modified_base (2184985)..(2184985): a, c, g or t
  modified_base (2185924)..(2185929): a, c, g or t
  modified_base (2185964)..(2185964): a, c, g or t
  modified_base (2185995)..(2185995): a, c, g or t
  modified_base (2186028)..(2186028): a, c, g or t
  modified_base (2186031)..(2186031): a, c, g or t
  modified_base (2186039)..(2186039): a, c, g or t
  modified_base (2186095)..(2186095): a, c, g or t
  modified_base (2188556)..(2188556): a, c, g or t
  modified_base (2189102)..(2189102): a, c, g or t
  modified_base (2190201)..(2190201): a, c, g or t
  modified_base (2190461)..(2190461): a, c, g or t
  modified_base (2190528)..(2190528): a, c, g or t
  modified_base (2190559)..(2190559): a, c, g or t
  modified_base (2190865)..(2190865): a, c, g or t
  modified_base (2190884)..(2190884): a, c, g or t
  modified_base (2193277)..(2193277): a, c, g or t
  modified_base (2193324)..(2193324): a, c, g or t
  modified_base (2193369)..(2193369): a, c, g or t
  modified_base (2193412)..(2193412): a, c, g or t
  modified_base (2195749)..(2195749): a, c, g or t
  modified_base (2196857)..(2196862): a, c, g or t
  modified_base (2199014)..(2199014): a, c, g or t
  modified_base (2200903)..(2200903): a, c, g or t
  modified_base (2203490)..(2203490): a, c, g or t
  modified_base (2204742)..(2204743): a, c, g or t
  modified_base (2204746)..(2204755): a, c, g or t
  modified_base (2206807)..(2206812): a, c, g or t
  modified_base (2209392)..(2209392): a, c, g or t
  modified_base (2210768)..(2210768): a, c, g or t
  modified_base (2210983)..(2210986): a, c, g or t
  modified_base (2211374)..(2211374): a, c, g or t
  modified_base (2212180)..(2212180): a, c, g or t
  modified_base (2212324)..(2212324): a, c, g or t
  modified_base (2215006)..(2215009): a, c, g or t
  modified_base (2215016)..(2215016): a, c, g or t
  modified_base (2215072)..(2215077): a, c, g or t
  modified_base (2215087)..(2215087): a, c, g or t
  modified_base (2215545)..(2215545): a, c, g or t
  modified_base (2216652)..(2216652): a, c, g or t
  modified_base (2218962)..(2219000): a, c, g or t
  modified_base (2219002)..(2219002): a, c, g or t
  modified_base (2219023)..(2219027): a, c, g or t
  modified_base (2220740)..(2220748): a, c, g or t
  modified_base (2221594)..(2221594): a, c, g or t
  modified_base (2221826)..(2221829): a, c, g or t
  modified_base (2222192)..(2222192): a, c, g or t
  modified_base (2224885)..(2224885): a, c, g or t
  modified_base (2224888)..(2224893): a, c, g or t
  modified_base (2224898)..(2224899): a, c, g or t
  modified_base (2225896)..(2225896): a, c, g or t
  modified_base (2226475)..(2226475): a, c, g or t
  modified_base (2226527)..(2226527): a, c, g or t
  modified_base (2226902)..(2226902): a, c, g or t
  modified_base (2227975)..(2227975): a, c, g or t
  modified_base (2229073)..(2229073): a, c, g or t
  modified_base (2230791)..(2230794): a, c, g or t
  modified_base (2230796)..(2230796): a, c, g or t
  modified_base (2232274)..(2232274): a, c, g or t
  modified_base (2233491)..(2233491): a, c, g or t
  modified_base (2233493)..(2233493): a, c, g or t
  modified_base (2234294)..(2234294): a, c, g or t
  modified_base (2236848)..(2236848): a, c, g or t
  modified_base (2237825)..(2237825): a, c, g or t
  modified_base (2240303)..(2240303): a, c, g or t
  modified_base (2241256)..(2241256): a, c, g or t
  modified_base (2243119)..(2243119): a, c, g or t
  modified_base (2245078)..(2245078): a, c, g or t
  modified_base (2245098)..(2245098): a, c, g or t
  modified_base (2245236)..(2245237): a, c, g or t
  modified_base (2245239)..(2245247): a, c, g or t
  modified_base (2245996)..(2245999): a, c, g or t
  modified_base (2248493)..(2248496): a, c, g or t
  modified_base (2249987)..(2249987): a, c, g or t
  modified_base (2254511)..(2254517): a, c, g or t
  modified_base (2255966)..(2255966): a, c, g or t
  modified_base (2256338)..(2256341): a, c, g or t
  modified_base (2256745)..(2256751): a, c, g or t
  modified_base (2258175)..(2258175): a, c, g or t
  modified_base (2259270)..(2259270): a, c, g or t
  modified_base (2261843)..(2261843): a, c, g or t
  modified_base (2261848)..(2261858): a, c, g or t
  modified_base (2262697)..(2262697): a, c, g or t
  modified_base (2262705)..(2262705): a, c, g or t
  modified_base (2265397)..(2265397): a, c, g or t
  modified_base (2265560)..(2265560): a, c, g or t
  modified_base (2265732)..(2265733): a, c, g or t
  modified_base (2265739)..(2265743): a, c, g or t
  modified_base (2267160)..(2267160): a, c, g or t
  modified_base (2267207)..(2267207): a, c, g or t
  modified_base (2267224)..(2267224): a, c, g or t
  modified_base (2267238)..(2267238): a, c, g or t
  modified_base (2267249)..(2267249): a, c, g or t
  modified_base (2268168)..(2268168): a, c, g or t
  modified_base (2268646)..(2268646): a, c, g or t
  modified_base (2268741)..(2268741): a, c, g or t
  modified_base (2270937)..(2270937): a, c, g or t
  modified_base (2271317)..(2271317): a, c, g or t
  modified_base (2271865)..(2271865): a, c, g or t
  modified_base (2271892)..(2271892): a, c, g or t
  modified_base (2271906)..(2271906): a, c, g or t
  modified_base (2271952)..(2271952): a, c, g or t
  modified_base (2272263)..(2272263): a, c, g or t
  modified_base (2272480)..(2272481): a, c, g or t
  modified_base (2272484)..(2272487): a, c, g or t
  modified_base (2272836)..(2272836): a, c, g or t
  modified_base (2272974)..(2272974): a, c, g or t
  modified_base (2273263)..(2273263): a, c, g or t
  modified_base (2273624)..(2273627): a, c, g or t
  modified_base (2277161)..(2277161): a, c, g or t
  modified_base (2278605)..(2278628): a, c, g or t
  modified_base (2278646)..(2278648): a, c, g or t
  modified_base (2278650)..(2278651): a, c, g or t
  modified_base (2278654)..(2278654): a, c, g or t
  modified_base (2278815)..(2278815): a, c, g or t
  modified_base (2279832)..(2279832): a, c, g or t
  modified_base (2279834)..(2279837): a, c, g or t
  modified_base (2280878)..(2280878): a, c, g or t
  modified_base (2280986)..(2280986): a, c, g or t
  modified_base (2281557)..(2281557): a, c, g or t
  modified_base (2282449)..(2282449): a, c, g or t
  modified_base (2282536)..(2282536): a, c, g or t
  modified_base (2283027)..(2283027): a, c, g or t
  modified_base (2284291)..(2284292): a, c, g or t
  modified_base (2284294)..(2284305): a, c, g or t
  modified_base (2285953)..(2285953): a, c, g or t
  modified_base (2287001)..(2287003): a, c, g or t
  modified_base (2287446)..(2287449): a, c, g or t
  modified_base (2287452)..(2287455): a, c, g or t
  modified_base (2288743)..(2288743): a, c, g or t
  modified_base (2288862)..(2288862): a, c, g or t
  modified_base (2288933)..(2288933): a, c, g or t
  modified_base (2290227)..(2290233): a, c, g or t
  modified_base (2290907)..(2290907): a, c, g or t
  modified_base (2290917)..(2290917): a, c, g or t
  modified_base (2290954)..(2290954): a, c, g or t
  modified_base (2291144)..(2291144): a, c, g or t
  modified_base (2291959)..(2291962): a, c, g or t
  modified_base (2292442)..(2292442): a, c, g or t
  modified_base (2293207)..(2293210): a, c, g or t
  modified_base (2295856)..(2295861): a, c, g or t
  modified_base (2295867)..(2295868): a, c, g or t
  modified_base (2295966)..(2295969): a, c, g or t
  modified_base (2295993)..(2296024): a, c, g or t
  modified_base (2296041)..(2296042): a, c, g or t
  modified_base (2296044)..(2296045): a, c, g or t
  modified_base (2296051)..(2296051): a, c, g or t
  modified_base (2296054)..(2296068): a, c, g or t
  modified_base (2296772)..(2296775): a, c, g or t
  modified_base (2297102)..(2297102): a, c, g or t
  modified_base (2297706)..(2297706): a, c, g or t
  modified_base (2297885)..(2297885): a, c, g or t
  modified_base (2298769)..(2298769): a, c, g or t
  modified_base (2299225)..(2299229): a, c, g or t
  modified_base (2300238)..(2300238): a, c, g or t
  modified_base (2301867)..(2301867): a, c, g or t
  modified_base (2303275)..(2303275): a, c, g or t
  modified_base (2305692)..(2305692): a, c, g or t
  modified_base (2306144)..(2306145): a, c, g or t
  modified_base (2306404)..(2306416): a, c, g or t
  modified_base (2306929)..(2306929): a, c, g or t
  modified_base (2307052)..(2307052): a, c, g or t
  modified_base (2307174)..(2307175): a, c, g or t
  modified_base (2307177)..(2307178): a, c, g or t
  modified_base (2307412)..(2307412): a, c, g or t
  modified_base (2307452)..(2307457): a, c, g or t
  modified_base (2307459)..(2307460): a, c, g or t
  modified_base (2307536)..(2307537): a, c, g or t
  modified_base (2307543)..(2307546): a, c, g or t
  modified_base (2307548)..(2307602): a, c, g or t
  modified_base (2307608)..(2307609): a, c, g or t
  modified_base (2307613)..(2307614): a, c, g or t
  modified_base (2307618)..(2307619): a, c, g or t
  modified_base (2307623)..(2307680): a, c, g or t
  modified_base (2307686)..(2307687): a, c, g or t
  modified_base (2307700)..(2307759): a, c, g or t
  modified_base (2307765)..(2307766): a, c, g or t
  modified_base (2307798)..(2307798): a, c, g or t
  modified_base (2307821)..(2307821): a, c, g or t
  modified_base (2307823)..(2307824): a, c, g or t
  modified_base (2307834)..(2307835): a, c, g or t
  modified_base (2307839)..(2307840): a, c, g or t
  modified_base (2307844)..(2307845): a, c, g or t
  modified_base (2307849)..(2307855): a, c, g or t
  modified_base (2307866)..(2307867): a, c, g or t
  modified_base (2307871)..(2307872): a, c, g or t
  modified_base (2307878)..(2307926): a, c, g or t
  modified_base (2307928)..(2307929): a, c, g or t
  modified_base (2307951)..(2308002): a, c, g or t
  modified_base (2308004)..(2308005): a, c, g or t
  modified_base (2308058)..(2308101): a, c, g or t
  modified_base (2308103)..(2308107): a, c, g or t
  modified_base (2308111)..(2308112): a, c, g or t
  modified_base (2308291)..(2308336): a, c, g or t
  modified_base (2308415)..(2308415): a, c, g or t
  modified_base (2308467)..(2308467): a, c, g or t
  modified_base (2308473)..(2308473): a, c, g or t
  modified_base (2308522)..(2308522): a, c, g or t
  modified_base (2308535)..(2308535): a, c, g or t
  modified_base (2308547)..(2308547): a, c, g or t
  modified_base (2308565)..(2308565): a, c, g or t
  modified_base (2308569)..(2308569): a, c, g or t
  modified_base (2308586)..(2308586): a, c, g or t
  modified_base (2308595)..(2308595): a, c, g or t
  modified_base (2308645)..(2308645): a, c, g or t
  modified_base (2308705)..(2308705): a, c, g or t
  modified_base (2308732)..(2308732): a, c, g or t
  modified_base (2308871)..(2308908): a, c, g or t
  modified_base (2308965)..(2308965): a, c, g or t
  modified_base (2308968)..(2308970): a, c, g or t
  modified_base (2308972)..(2308976): a, c, g or t
  modified_base (2309022)..(2309062): a, c, g or t
  modified_base (2309166)..(2309173): a, c, g or t
  modified_base (2309175)..(2309182): a, c, g or t
  modified_base (2309199)..(2309199): a, c, g or t
  modified_base (2309353)..(2309353): a, c, g or t
  modified_base (2309361)..(2309361): a, c, g or t
  modified_base (2309400)..(2309401): a, c, g or t
  modified_base (2309403)..(2309408): a, c, g or t
  modified_base (2309410)..(2309411): a, c, g or t
  modified_base (2309416)..(2309416): a, c, g or t
  modified_base (2309614)..(2309620): a, c, g or t
  modified_base (2309649)..(2309649): a, c, g or t
  modified_base (2309652)..(2309704): a, c, g or t
  modified_base (2309890)..(2309895): a, c, g or t
  modified_base (2309899)..(2309899): a, c, g or t
  modified_base (2309924)..(2309924): a, c, g or t
  modified_base (2309993)..(2310034): a, c, g or t
  modified_base (2310043)..(2310043): a, c, g or t
  modified_base (2310106)..(2310109): a, c, g or t
  modified_base (2310180)..(2310180): a, c, g or t
  modified_base (2310211)..(2310211): a, c, g or t
  modified_base (2310234)..(2310234): a, c, g or t
  modified_base (2310248)..(2310248): a, c, g or t
  modified_base (2310307)..(2310309): a, c, g or t
  modified_base (2310332)..(2310372): a, c, g or t
  modified_base (2310525)..(2310525): a, c, g or t
  modified_base (2310551)..(2310551): a, c, g or t
  modified_base (2310556)..(2310556): a, c, g or t
  modified_base (2310610)..(2310610): a, c, g or t
  modified_base (2310614)..(2310614): a, c, g or t
  modified_base (2310617)..(2310617): a, c, g or t
  modified_base (2310622)..(2310639): a, c, g or t
  modified_base (2310649)..(2310649): a, c, g or t
  modified_base (2310662)..(2310663): a, c, g or t
  modified_base (2310671)..(2310671): a, c, g or t
  modified_base (2310725)..(2310773): a, c, g or t
  modified_base (2310802)..(2310802): a, c, g or t
  modified_base (2311098)..(2311101): a, c, g or t
  modified_base (2311155)..(2311192): a, c, g or t
  modified_base (2311264)..(2311264): a, c, g or t
  modified_base (2311291)..(2311291): a, c, g or t
  modified_base (2311304)..(2311307): a, c, g or t
  modified_base (2311318)..(2311319): a, c, g or t
  modified_base (2311332)..(2311335): a, c, g or t
  modified_base (2311341)..(2311342): a, c, g or t
  modified_base (2311344)..(2311390): a, c, g or t
  modified_base (2311392)..(2311393): a, c, g or t
  modified_base (2311431)..(2311431): a, c, g or t
  modified_base (2311459)..(2311615): a, c, g or t
  modified_base (2311647)..(2311648): a, c, g or t
  modified_base (2311671)..(2311673): a, c, g or t
  modified_base (2311675)..(2311729): a, c, g or t
  modified_base (2311766)..(2311848): a, c, g or t
  modified_base (2311859)..(2311860): a, c, g or t
  modified_base (2311932)..(2312019): a, c, g or t
  modified_base (2312279)..(2312284): a, c, g or t
  modified_base (2312304)..(2312320): a, c, g or t
  modified_base (2312334)..(2312334): a, c, g or t
  modified_base (2312339)..(2312340): a, c, g or t
  modified_base (2312343)..(2312343): a, c, g or t
  modified_base (2312426)..(2312466): a, c, g or t
  modified_base (2312472)..(2312473): a, c, g or t
  modified_base (2312488)..(2312587): a, c, g or t
  modified_base (2312628)..(2312642): a, c, g or t
  modified_base (2312647)..(2312648): a, c, g or t
  modified_base (2312716)..(2312723): a, c, g or t
  modified_base (2312746)..(2312850): a, c, g or t
  modified_base (2312875)..(2312934): a, c, g or t
  modified_base (2312958)..(2313029): a, c, g or t
  modified_base (2313031)..(2313031): a, c, g or t
  modified_base (2313068)..(2313113): a, c, g or t
  modified_base (2313155)..(2313197): a, c, g or t
  modified_base (2313241)..(2313241): a, c, g or t
  modified_base (2313277)..(2313277): a, c, g or t
  modified_base (2313280)..(2313280): a, c, g or t
  modified_base (2313311)..(2313351): a, c, g or t
  modified_base (2313365)..(2313365): a, c, g or t
  modified_base (2313370)..(2313370): a, c, g or t
  modified_base (2313403)..(2313403): a, c, g or t
  modified_base (2313439)..(2313439): a, c, g or t
  modified_base (2313463)..(2313463): a, c, g or t
  modified_base (2313519)..(2313519): a, c, g or t
  modified_base (2313552)..(2313553): a, c, g or t
  modified_base (2313556)..(2313598): a, c, g or t
  modified_base (2313605)..(2313605): a, c, g or t
  modified_base (2313673)..(2313676): a, c, g or t
  modified_base (2313685)..(2313724): a, c, g or t
  modified_base (2313738)..(2313738): a, c, g or t
  modified_base (2313819)..(2313819): a, c, g or t
  modified_base (2313823)..(2313843): a, c, g or t
  modified_base (2313912)..(2313912): a, c, g or t
  modified_base (2313978)..(2313978): a, c, g or t
  modified_base (2313987)..(2313987): a, c, g or t
  modified_base (2313996)..(2313996): a, c, g or t
  modified_base (2314018)..(2314062): a, c, g or t
  modified_base (2314181)..(2314181): a, c, g or t
  modified_base (2314334)..(2314374): a, c, g or t
  modified_base (2314523)..(2314523): a, c, g or t
  modified_base (2314604)..(2314604): a, c, g or t
  modified_base (2314644)..(2314681): a, c, g or t
  modified_base (2314685)..(2314686): a, c, g or t
  modified_base (2314710)..(2314713): a, c, g or t
  modified_base (2314721)..(2314721): a, c, g or t
  modified_base (2314756)..(2314756): a, c, g or t
  modified_base (2314835)..(2314885): a, c, g or t
  modified_base (2314907)..(2314946): a, c, g or t
  modified_base (2314979)..(2314979): a, c, g or t
  modified_base (2315009)..(2315009): a, c, g or t
  modified_base (2315027)..(2315027): a, c, g or t
  modified_base (2315033)..(2315034): a, c, g or t
  modified_base (2315037)..(2315077): a, c, g or t
  modified_base (2315090)..(2315095): a, c, g or t
  modified_base (2315322)..(2315322): a, c, g or t
  modified_base (2315337)..(2315337): a, c, g or t
  modified_base (2315355)..(2315355): a, c, g or t
  modified_base (2315358)..(2315360): a, c, g or t
  modified_base (2315366)..(2315406): a, c, g or t
  modified_base (2315409)..(2315409): a, c, g or t
  modified_base (2315457)..(2315502): a, c, g or t
  modified_base (2315511)..(2315511): a, c, g or t
  modified_base (2315517)..(2315517): a, c, g or t
  modified_base (2315520)..(2315520): a, c, g or t
  modified_base (2315526)..(2315579): a, c, g or t
  modified_base (2315623)..(2315662): a, c, g or t
  modified_base (2315706)..(2315706): a, c, g or t
  modified_base (2315732)..(2315780): a, c, g or t
  modified_base (2315804)..(2315806): a, c, g or t
  modified_base (2315810)..(2315811): a, c, g or t
  modified_base (2315813)..(2315828): a, c, g or t
  modified_base (2315903)..(2315906): a, c, g or t
  modified_base (2315908)..(2315908): a, c, g or t
  modified_base (2316008)..(2316008): a, c, g or t
  modified_base (2316012)..(2316012): a, c, g or t
  modified_base (2316165)..(2316165): a, c, g or t
  modified_base (2316291)..(2316291): a, c, g or t
  modified_base (2316300)..(2316300): a, c, g or t
  modified_base (2316315)..(2316315): a, c, g or t
  modified_base (2316327)..(2316327): a, c, g or t
  modified_base (2316465)..(2316465): a, c, g or t
  modified_base (2316519)..(2316519): a, c, g or t
  modified_base (2316541)..(2316546): a, c, g or t
  modified_base (2316683)..(2316683): a, c, g or t
  modified_base (2316755)..(2316755): a, c, g or t
  modified_base (2316785)..(2316785): a, c, g or t
  modified_base (2316836)..(2316836): a, c, g or t
  modified_base (2316948)..(2316950): a, c, g or t
  modified_base (2317054)..(2317054): a, c, g or t
  modified_base (2317062)..(2317062): a, c, g or t
  modified_base (2317183)..(2317183): a, c, g or t
  modified_base (2317186)..(2317186): a, c, g or t
  modified_base (2317188)..(2317206): a, c, g or t
  modified_base (2317210)..(2317210): a, c, g or t
  modified_base (2317218)..(2317219): a, c, g or t
  modified_base (2317221)..(2317222): a, c, g or t
  modified_base (2317375)..(2317375): a, c, g or t
  modified_base (2317399)..(2317399): a, c, g or t
  modified_base (2317486)..(2317486): a, c, g or t
  modified_base (2317726)..(2317726): a, c, g or t
  modified_base (2317737)..(2317737): a, c, g or t
  modified_base (2317749)..(2317749): a, c, g or t
  modified_base (2317797)..(2317797): a, c, g or t
  modified_base (2317813)..(2317813): a, c, g or t
  modified_base (2317903)..(2317903): a, c, g or t
  modified_base (2319617)..(2319617): a, c, g or t
  modified_base (2319671)..(2319671): a, c, g or t
  modified_base (2319673)..(2319676): a, c, g or t
  modified_base (2319782)..(2319782): a, c, g or t
  modified_base (2320203)..(2320203): a, c, g or t
  modified_base (2320273)..(2320278): a, c, g or t
  modified_base (2320282)..(2320282): a, c, g or t
  modified_base (2320333)..(2320336): a, c, g or t
  modified_base (2320339)..(2320339): a, c, g or t
  modified_base (2320383)..(2320400): a, c, g or t
  modified_base (2320412)..(2320412): a, c, g or t
  modified_base (2320526)..(2320526): a, c, g or t
  modified_base (2320595)..(2320643): a, c, g or t
  modified_base (2320646)..(2320646): a, c, g or t
  modified_base (2320673)..(2320673): a, c, g or t
  modified_base (2320675)..(2320720): a, c, g or t
  modified_base (2320731)..(2320732): a, c, g or t
  modified_base (2320742)..(2320782): a, c, g or t
  modified_base (2320803)..(2320816): a, c, g or t
  modified_base (2320830)..(2320836): a, c, g or t
  modified_base (2320842)..(2320842): a, c, g or t
  modified_base (2320845)..(2320845): a, c, g or t
  modified_base (2320848)..(2320848): a, c, g or t
  modified_base (2320896)..(2320896): a, c, g or t
  modified_base (2320987)..(2320990): a, c, g or t
  modified_base (2321056)..(2321056): a, c, g or t
  modified_base (2321156)..(2321196): a, c, g or t
  modified_base (2321957)..(2321957): a, c, g or t
  modified_base (2321963)..(2321963): a, c, g or t
  modified_base (2321999)..(2322002): a, c, g or t
  modified_base (2322005)..(2322029): a, c, g or t
  modified_base (2322035)..(2322039): a, c, g or t
  modified_base (2322181)..(2322181): a, c, g or t
  modified_base (2322734)..(2322734): a, c, g or t
  modified_base (2322741)..(2322743): a, c, g or t
  modified_base (2322751)..(2322752): a, c, g or t
  modified_base (2323168)..(2323209): a, c, g or t
  modified_base (2323774)..(2323774): a, c, g or t
  modified_base (2323866)..(2323867): a, c, g or t
  modified_base (2324051)..(2324091): a, c, g or t
  modified_base (2325273)..(2325273): a, c, g or t
  modified_base (2327022)..(2327022): a, c, g or t
  modified_base (2327418)..(2327418): a, c, g or t
  modified_base (2327895)..(2327895): a, c, g or t
  modified_base (2328847)..(2328847): a, c, g or t
  modified_base (2328850)..(2328952): a, c, g or t
  modified_base (2328984)..(2328989): a, c, g or t
  modified_base (2328994)..(2329043): a, c, g or t
  modified_base (2329077)..(2329077): a, c, g or t
  modified_base (2329178)..(2329178): a, c, g or t
  modified_base (2329187)..(2329229): a, c, g or t
  modified_base (2329325)..(2329332): a, c, g or t
  modified_base (2329362)..(2329363): a, c, g or t
  modified_base (2329392)..(2329392): a, c, g or t
  modified_base (2329404)..(2329417): a, c, g or t
  modified_base (2329443)..(2329499): a, c, g or t
  modified_base (2329534)..(2329639): a, c, g or t
  modified_base (2329674)..(2329674): a, c, g or t
  modified_base (2329677)..(2329885): a, c, g or t
  modified_base (2329887)..(2329888): a, c, g or t
  modified_base (2329909)..(2330163): a, c, g or t
  modified_base (2330165)..(2330171): a, c, g or t
  modified_base (2330177)..(2330177): a, c, g or t
  modified_base (2330194)..(2330201): a, c, g or t
  modified_base (2330212)..(2330212): a, c, g or t
  modified_base (2330226)..(2330249): a, c, g or t
  modified_base (2330259)..(2330260): a, c, g or t
  modified_base (2330274)..(2330274): a, c, g or t
  modified_base (2330280)..(2330281): a, c, g or t
  modified_base (2330318)..(2330319): a, c, g or t
  modified_base (2330324)..(2330347): a, c, g or t
  modified_base (2330355)..(2330356): a, c, g or t
  modified_base (2330385)..(2330385): a, c, g or t
  modified_base (2330387)..(2330395): a, c, g or t
  modified_base (2330397)..(2330398): a, c, g or t
  modified_base (2330402)..(2330403): a, c, g or t
  modified_base (2330406)..(2330406): a, c, g or t
  modified_base (2330419)..(2330438): a, c, g or t
  modified_base (2330491)..(2330572): a, c, g or t
  modified_base (2330586)..(2330586): a, c, g or t
  modified_base (2330589)..(2330591): a, c, g or t
  modified_base (2330593)..(2330594): a, c, g or t
  modified_base (2330596)..(2330604): a, c, g or t
  modified_base (2330655)..(2330655): a, c, g or t
  modified_base (2330658)..(2330664): a, c, g or t
  modified_base (2330755)..(2330779): a, c, g or t
  modified_base (2330791)..(2330792): a, c, g or t
  modified_base (2330803)..(2330817): a, c, g or t
  modified_base (2330841)..(2330857): a, c, g or t
  modified_base (2330914)..(2330953): a, c, g or t
  modified_base (2331105)..(2331156): a, c, g or t
  modified_base (2331179)..(2331179): a, c, g or t
  modified_base (2331201)..(2331248): a, c, g or t
  modified_base (2331262)..(2331262): a, c, g or t
  modified_base (2331364)..(2331364): a, c, g or t
  modified_base (2331403)..(2331465): a, c, g or t
  modified_base (2331689)..(2331696): a, c, g or t
  modified_base (2332026)..(2332066): a, c, g or t
  modified_base (2332192)..(2332239): a, c, g or t
  modified_base (2332247)..(2332247): a, c, g or t
  modified_base (2332304)..(2332307): a, c, g or t
  modified_base (2332335)..(2332336): a, c, g or t
  modified_base (2332338)..(2332341): a, c, g or t
  modified_base (2332416)..(2332453): a, c, g or t
  modified_base (2332486)..(2332486): a, c, g or t
  modified_base (2332537)..(2332594): a, c, g or t
  modified_base (2332966)..(2333017): a, c, g or t
  modified_base (2333022)..(2333023): a, c, g or t
  modified_base (2333086)..(2333089): a, c, g or t
  modified_base (2333375)..(2333434): a, c, g or t
  modified_base (2333447)..(2333448): a, c, g or t
  modified_base (2333452)..(2333453): a, c, g or t
  modified_base (2333456)..(2333464): a, c, g or t
  modified_base (2333466)..(2333466): a, c, g or t
  modified_base (2333555)..(2333555): a, c, g or t
  modified_base (2333595)..(2333676): a, c, g or t
  modified_base (2333678)..(2333681): a, c, g or t
  modified_base (2333683)..(2333683): a, c, g or t
  modified_base (2333703)..(2333705): a, c, g or t
  modified_base (2333716)..(2333720): a, c, g or t
  modified_base (2333790)..(2333790): a, c, g or t
  modified_base (2333792)..(2333800): a, c, g or t
  modified_base (2333867)..(2333907): a, c, g or t
  modified_base (2333909)..(2333910): a, c, g or t
  modified_base (2333923)..(2333924): a, c, g or t
  modified_base (2333952)..(2333959): a, c, g or t
  modified_base (2334016)..(2334016): a, c, g or t
  modified_base (2334028)..(2334030): a, c, g or t
  modified_base (2334033)..(2334034): a, c, g or t
  modified_base (2334036)..(2334048): a, c, g or t
  modified_base (2334085)..(2334141): a, c, g or t
  modified_base (2334147)..(2334147): a, c, g or t
  modified_base (2334276)..(2334315): a, c, g or t
  modified_base (2334391)..(2334430): a, c, g or t
  modified_base (2334465)..(2334465): a, c, g or t
  modified_base (2334496)..(2334537): a, c, g or t
  modified_base (2334681)..(2334721): a, c, g or t
  modified_base (2335005)..(2335005): a, c, g or t
  modified_base (2335128)..(2335128): a, c, g or t
  modified_base (2335478)..(2335480): a, c, g or t
  modified_base (2335482)..(2335525): a, c, g or t
  modified_base (2335543)..(2335543): a, c, g or t
  modified_base (2335621)..(2335624): a, c, g or t
  modified_base (2335626)..(2335693): a, c, g or t
  modified_base (2335715)..(2335715): a, c, g or t
  modified_base (2335720)..(2335745): a, c, g or t
  modified_base (2335749)..(2335750): a, c, g or t
  modified_base (2335792)..(2335793): a, c, g or t
  modified_base (2335795)..(2335797): a, c, g or t
  modified_base (2335799)..(2335803): a, c, g or t
  modified_base (2335824)..(2335858): a, c, g or t
  modified_base (2335874)..(2335874): a, c, g or t
  modified_base (2335884)..(2335884): a, c, g or t
  modified_base (2335913)..(2335914): a, c, g or t
  modified_base (2335971)..(2335996): a, c, g or t
  modified_base (2336002)..(2336003): a, c, g or t
  modified_base (2336047)..(2336121): a, c, g or t
  modified_base (2336129)..(2336129): a, c, g or t
  modified_base (2336141)..(2336142): a, c, g or t
  modified_base (2336144)..(2336176): a, c, g or t
  modified_base (2336201)..(2336201): a, c, g or t
  modified_base (2336203)..(2336204): a, c, g or t
  modified_base (2336231)..(2336265): a, c, g or t
  modified_base (2336282)..(2336282): a, c, g or t
  modified_base (2336306)..(2336316): a, c, g or t
  modified_base (2336333)..(2336333): a, c, g or t
  modified_base (2336336)..(2336336): a, c, g or t
  modified_base (2336340)..(2336360): a, c, g or t
  modified_base (2336371)..(2336372): a, c, g or t
  modified_base (2336374)..(2336375): a, c, g or t
  modified_base (2336378)..(2336378): a, c, g or t
  modified_base (2336381)..(2336382): a, c, g or t
  modified_base (2336388)..(2336390): a, c, g or t
  modified_base (2336401)..(2336402): a, c, g or t
  modified_base (2336409)..(2336412): a, c, g or t
  modified_base (2336420)..(2336495): a, c, g or t
  modified_base (2336511)..(2336511): a, c, g or t
  modified_base (2336519)..(2336545): a, c, g or t
  modified_base (2336582)..(2336583): a, c, g or t
  modified_base (2336601)..(2336601): a, c, g or t
  modified_base (2336605)..(2336621): a, c, g or t
  modified_base (2336626)..(2336626): a, c, g or t
  modified_base (2336628)..(2336630): a, c, g or t
  modified_base (2336684)..(2336684): a, c, g or t
  modified_base (2336693)..(2336693): a, c, g or t
  modified_base (2336697)..(2336727): a, c, g or t
  modified_base (2336732)..(2336734): a, c, g or t
  modified_base (2336768)..(2336768): a, c, g or t
  modified_base (2336795)..(2336795): a, c, g or t
  modified_base (2336802)..(2336809): a, c, g or t
  modified_base (2336840)..(2336841): a, c, g or t
  modified_base (2336843)..(2336878): a, c, g or t
  modified_base (2336882)..(2336883): a, c, g or t
  modified_base (2336888)..(2336889): a, c, g or t
  modified_base (2336896)..(2336897): a, c, g or t
  modified_base (2336899)..(2336933): a, c, g or t
  modified_base (2336942)..(2336942): a, c, g or t
  modified_base (2337063)..(2337063): a, c, g or t
  modified_base (2337347)..(2337349): a, c, g or t
  modified_base (2337438)..(2337439): a, c, g or t
  modified_base (2337725)..(2337751): a, c, g or t
  modified_base (2338050)..(2338050): a, c, g or t
  modified_base (2338206)..(2338208): a, c, g or t
  modified_base (2338210)..(2338214): a, c, g or t
  modified_base (2338218)..(2338219): a, c, g or t
  modified_base (2338252)..(2338314): a, c, g or t
  modified_base (2338357)..(2338386): a, c, g or t
  modified_base (2338390)..(2338391): a, c, g or t
  modified_base (2338403)..(2338403): a, c, g or t
  modified_base (2338407)..(2338407): a, c, g or t
  modified_base (2338409)..(2338410): a, c, g or t
  modified_base (2339040)..(2339041): a, c, g or t
  modified_base (2340101)..(2340101): a, c, g or t
  modified_base (2340209)..(2340209): a, c, g or t
  modified_base (2341096)..(2341096): a, c, g or t
  modified_base (2341482)..(2341482): a, c, g or t
  modified_base (2341517)..(2341517): a, c, g or t
  modified_base (2341570)..(2341570): a, c, g or t
  modified_base (2341948)..(2341948): a, c, g or t
  modified_base (2342183)..(2342184): a, c, g or t
  modified_base (2342653)..(2342654): a, c, g or t
  modified_base (2343190)..(2343191): a, c, g or t
  modified_base (2343661)..(2343662): a, c, g or t
  modified_base (2343760)..(2343760): a, c, g or t
  modified_base (2345077)..(2345077): a, c, g or t
  modified_base (2345364)..(2345364): a, c, g or t
  modified_base (2345596)..(2345596): a, c, g or t
  modified_base (2345598)..(2345599): a, c, g or t
  modified_base (2345624)..(2345624): a, c, g or t
  modified_base (2345912)..(2345913): a, c, g or t
  modified_base (2345977)..(2345978): a, c, g or t
  modified_base (2346920)..(2346920): a, c, g or t
  modified_base (2347710)..(2347719): a, c, g or t
  modified_base (2347944)..(2347947): a, c, g or t
  modified_base (2347952)..(2347952): a, c, g or t
  modified_base (2348602)..(2348642): a, c, g or t
  modified_base (2348663)..(2348705): a, c, g or t
  modified_base (2348728)..(2348768): a, c, g or t
  modified_base (2348792)..(2348832): a, c, g or t
  modified_base (2348858)..(2348858): a, c, g or t
  modified_base (2348860)..(2348898): a, c, g or t
  modified_base (2348922)..(2348961): a, c, g or t
  modified_base (2349003)..(2349011): a, c, g or t
  modified_base (2354137)..(2354137): a, c, g or t
  modified_base (2354149)..(2354149): a, c, g or t
  modified_base (2355304)..(2355304): a, c, g or t
  modified_base (2355325)..(2355325): a, c, g or t
  modified_base (2355338)..(2355338): a, c, g or t
  modified_base (2355683)..(2355683): a, c, g or t
  modified_base (2355712)..(2355712): a, c, g or t
  modified_base (2355725)..(2355725): a, c, g or t
  modified_base (2356518)..(2356521): a, c, g or t
  modified_base (2356945)..(2356945): a, c, g or t
  modified_base (2358816)..(2358816): a, c, g or t
  modified_base (2359731)..(2359736): a, c, g or t
  modified_base (2360809)..(2360810): a, c, g or t
  modified_base (2361034)..(2361034): a, c, g or t
  modified_base (2361283)..(2361283): a, c, g or t
  modified_base (2363173)..(2363174): a, c, g or t
  modified_base (2363177)..(2363179): a, c, g or t
  modified_base (2363346)..(2363349): a, c, g or t
  modified_base (2363389)..(2363391): a, c, g or t
  modified_base (2363668)..(2363668): a, c, g or t
  modified_base (2365723)..(2365723): a, c, g or t
  modified_base (2366181)..(2366190): a, c, g or t
  modified_base (2366406)..(2366413): a, c, g or t
  modified_base (2368192)..(2368192): a, c, g or t
  modified_base (2368671)..(2368671): a, c, g or t
  modified_base (2368746)..(2368746): a, c, g or t
  modified_base (2369318)..(2369318): a, c, g or t
  modified_base (2369320)..(2369322): a, c, g or t
  modified_base (2370530)..(2370530): a, c, g or t
  modified_base (2370704)..(2370704): a, c, g or t
  modified_base (2370708)..(2370708): a, c, g or t
  modified_base (2371116)..(2371116): a, c, g or t
  modified_base (2374782)..(2374782): a, c, g or t
  modified_base (2375594)..(2375597): a, c, g or t
  modified_base (2375689)..(2375692): a, c, g or t
  modified_base (2375990)..(2375990): a, c, g or t
  modified_base (2377589)..(2377589): a, c, g or t
  modified_base (2379803)..(2379803): a, c, g or t
  modified_base (2384380)..(2384380): a, c, g or t
  modified_base (2384534)..(2384535): a, c, g or t
  modified_base (2385449)..(2385450): a, c, g or t
  modified_base (2385485)..(2385486): a, c, g or t
  modified_base (2385492)..(2385498): a, c, g or t
  modified_base (2385574)..(2385690): a, c, g or t
  modified_base (2385722)..(2385725): a, c, g or t
  modified_base (2386088)..(2386088): a, c, g or t
  modified_base (2386090)..(2386091): a, c, g or t
  modified_base (2387456)..(2387457): a, c, g or t
  modified_base (2387459)..(2387460): a, c, g or t
  modified_base (2387517)..(2387519): a, c, g or t
  modified_base (2387840)..(2387840): a, c, g or t
  modified_base (2390132)..(2390132): a, c, g or t
  modified_base (2390275)..(2390275): a, c, g or t
  modified_base (2391458)..(2391458): a, c, g or t
  modified_base (2395031)..(2395035): a, c, g or t
  modified_base (2398174)..(2398174): a, c, g or t
  modified_base (2399148)..(2399148): a, c, g or t
  modified_base (2399219)..(2399223): a, c, g or t
  modified_base (2400774)..(2400774): a, c, g or t
  modified_base (2400806)..(2400806): a, c, g or t
  modified_base (2400825)..(2400830): a, c, g or t
  modified_base (2401194)..(2401194): a, c, g or t
  modified_base (2401642)..(2401642): a, c, g or t
  modified_base (2406672)..(2406675): a, c, g or t
  modified_base (2406778)..(2406782): a, c, g or t
  modified_base (2407667)..(2407667): a, c, g or t
  modified_base (2409963)..(2409964): a, c, g or t
  modified_base (2410236)..(2410239): a, c, g or t
  modified_base (2410283)..(2410283): a, c, g or t
  modified_base (2410357)..(2410361): a, c, g or t
  modified_base (2410364)..(2410364): a, c, g or t
  modified_base (2411914)..(2411914): a, c, g or t
  modified_base (2415771)..(2415774): a, c, g or t
  modified_base (2416399)..(2416400): a, c, g or t
  modified_base (2416406)..(2416407): a, c, g or t
  modified_base (2419025)..(2419026): a, c, g or t
  modified_base (2419132)..(2419135): a, c, g or t
  modified_base (2419137)..(2419138): a, c, g or t
  modified_base (2423085)..(2423086): a, c, g or t
  modified_base (2423655)..(2423658): a, c, g or t
  modified_base (2423662)..(2423672): a, c, g or t
  modified_base (2423795)..(2423810): a, c, g or t
  modified_base (2424695)..(2424696): a, c, g or t
  modified_base (2424698)..(2424701): a, c, g or t
  modified_base (2424737)..(2424746): a, c, g or t
  modified_base (2424902)..(2424903): a, c, g or t
  modified_base (2425955)..(2425956): a, c, g or t
  modified_base (2427322)..(2427323): a, c, g or t
  modified_base (2427528)..(2427529): a, c, g or t
  modified_base (2428812)..(2428824): a, c, g or t
  modified_base (2429615)..(2429625): a, c, g or t
  modified_base (2429628)..(2429629): a, c, g or t
  modified_base (2430550)..(2430553): a, c, g or t
  modified_base (2431764)..(2431765): a, c, g or t
  modified_base (2431768)..(2431774): a, c, g or t
  modified_base (2433072)..(2433080): a, c, g or t
  modified_base (2434190)..(2434194): a, c, g or t
  modified_base (2434280)..(2434319): a, c, g or t
  modified_base (2434400)..(2434439): a, c, g or t
  modified_base (2435669)..(2435669): a, c, g or t
  modified_base (2435672)..(2435677): a, c, g or t
  modified_base (2436931)..(2436931): a, c, g or t
  modified_base (2438463)..(2438463): a, c, g or t
  modified_base (2438476)..(2438479): a, c, g or t
  modified_base (2438659)..(2438662): a, c, g or t
  modified_base (2439809)..(2439815): a, c, g or t
  modified_base (2439853)..(2439853): a, c, g or t
  modified_base (2440058)..(2440058): a, c, g or t
  modified_base (2442035)..(2442050): a, c, g or t
  modified_base (2442068)..(2442068): a, c, g or t
  modified_base (2442147)..(2442150): a, c, g or t
  modified_base (2442154)..(2442154): a, c, g or t
  modified_base (2442254)..(2442259): a, c, g or t
  modified_base (2442333)..(2442334): a, c, g or t
  modified_base (2442503)..(2442504): a, c, g or t
  modified_base (2444244)..(2444244): a, c, g or t
  modified_base (2444523)..(2444528): a, c, g or t
  modified_base (2444663)..(2444667): a, c, g or t
  modified_base (2445080)..(2445080): a, c, g or t
  modified_base (2445083)..(2445083): a, c, g or t
  modified_base (2445225)..(2445229): a, c, g or t
  modified_base (2445349)..(2445349): a, c, g or t
  modified_base (2446713)..(2446713): a, c, g or t
  modified_base (2446954)..(2446957): a, c, g or t
  modified_base (2447029)..(2447037): a, c, g or t
  modified_base (2447352)..(2447352): a, c, g or t
  modified_base (2447375)..(2447378): a, c, g or t
  modified_base (2448091)..(2448092): a, c, g or t
  modified_base (2449867)..(2449868): a, c, g or t
  modified_base (2451715)..(2451715): a, c, g or t
  modified_base (2451903)..(2451905): a, c, g or t
  modified_base (2452097)..(2452102): a, c, g or t
  modified_base (2452141)..(2452141): a, c, g or t
  modified_base (2453032)..(2453036): a, c, g or t
  modified_base (2453039)..(2453040): a, c, g or t
  modified_base (2454987)..(2454987): a, c, g or t
  modified_base (2455984)..(2455984): a, c, g or t
  modified_base (2456655)..(2456655): a, c, g or t
  modified_base (2456657)..(2456657): a, c, g or t
  modified_base (2457838)..(2457842): a, c, g or t
  modified_base (2458137)..(2458137): a, c, g or t
  modified_base (2459333)..(2459333): a, c, g or t
  modified_base (2459657)..(2459657): a, c, g or t
  modified_base (2460569)..(2460574): a, c, g or t
  modified_base (2460804)..(2460812): a, c, g or t
  modified_base (2460861)..(2460876): a, c, g or t
  modified_base (2460883)..(2460887): a, c, g or t
  modified_base (2461542)..(2461542): a, c, g or t
  modified_base (2462806)..(2462811): a, c, g or t
  modified_base (2462867)..(2462867): a, c, g or t
  modified_base (2463194)..(2463194): a, c, g or t
  modified_base (2464545)..(2464549): a, c, g or t
  modified_base (2465559)..(2465603): a, c, g or t
  modified_base (2465623)..(2465623): a, c, g or t
  modified_base (2465726)..(2465726): a, c, g or t
  modified_base (2465737)..(2465776): a, c, g or t
  modified_base (2466316)..(2466320): a, c, g or t
  modified_base (2467746)..(2467747): a, c, g or t
  modified_base (2468314)..(2468319): a, c, g or t
  modified_base (2469098)..(2469103): a, c, g or t
  modified_base (2469155)..(2469155): a, c, g or t
  modified_base (2469158)..(2469158): a, c, g or t
  modified_base (2469161)..(2469161): a, c, g or t
  modified_base (2470080)..(2470081): a, c, g or t
  modified_base (2470954)..(2470959): a, c, g or t
  modified_base (2470996)..(2470996): a, c, g or t
  modified_base (2471004)..(2471004): a, c, g or t
  modified_base (2471615)..(2471615): a, c, g or t
  modified_base (2471665)..(2471669): a, c, g or t
  modified_base (2471759)..(2471763): a, c, g or t
  modified_base (2471778)..(2471778): a, c, g or t
  modified_base (2473846)..(2473849): a, c, g or t
  modified_base (2473910)..(2473913): a, c, g or t
  modified_base (2473936)..(2473937): a, c, g or t
  modified_base (2474002)..(2474002): a, c, g or t
  modified_base (2474476)..(2474476): a, c, g or t
  modified_base (2474521)..(2474521): a, c, g or t
  modified_base (2475132)..(2475135): a, c, g or t
  modified_base (2475217)..(2475217): a, c, g or t
  modified_base (2475379)..(2475380): a, c, g or t
  modified_base (2475384)..(2475391): a, c, g or t
  modified_base (2477794)..(2477794): a, c, g or t
  modified_base (2477799)..(2477799): a, c, g or t
  modified_base (2478667)..(2478670): a, c, g or t
  modified_base (2478818)..(2478818): a, c, g or t
  modified_base (2478832)..(2478832): a, c, g or t
  modified_base (2478852)..(2478852): a, c, g or t
  modified_base (2479070)..(2479081): a, c, g or t
  modified_base (2481456)..(2481456): a, c, g or t
  modified_base (2481538)..(2481538): a, c, g or t
  modified_base (2481964)..(2481967): a, c, g or t
  modified_base (2482144)..(2482149): a, c, g or t
  modified_base (2485041)..(2485042): a, c, g or t
  modified_base (2486726)..(2486726): a, c, g or t
  modified_base (2486958)..(2486958): a, c, g or t
  modified_base (2487431)..(2487435): a, c, g or t
  modified_base (2487471)..(2487471): a, c, g or t
  modified_base (2487680)..(2487680): a, c, g or t
  modified_base (2488798)..(2488798): a, c, g or t
  modified_base (2489140)..(2489143): a, c, g or t
  modified_base (2489310)..(2489313): a, c, g or t
  modified_base (2489315)..(2489320): a, c, g or t
  modified_base (2489480)..(2489483): a, c, g or t
  modified_base (2489596)..(2489599): a, c, g or t
  modified_base (2489601)..(2489614): a, c, g or t
  modified_base (2490647)..(2490647): a, c, g or t
  modified_base (2496717)..(2496720): a, c, g or t
  modified_base (2500859)..(2500896): a, c, g or t
  modified_base (2501034)..(2501077): a, c, g or t
  modified_base (2501695)..(2501695): a, c, g or t
  modified_base (2502321)..(2502329): a, c, g or t
  modified_base (2504069)..(2504069): a, c, g or t
  modified_base (2505410)..(2505410): a, c, g or t
  modified_base (2505553)..(2505553): a, c, g or t
  modified_base (2505556)..(2505560): a, c, g or t
  modified_base (2505584)..(2505584): a, c, g or t
  modified_base (2506706)..(2506706): a, c, g or t
  modified_base (2506886)..(2506886): a, c, g or t
  modified_base (2507412)..(2507421): a, c, g or t
  modified_base (2507519)..(2507519): a, c, g or t
  modified_base (2508426)..(2508426): a, c, g or t
  modified_base (2511396)..(2511396): a, c, g or t
  modified_base (2511398)..(2511401): a, c, g or t
  modified_base (2511407)..(2511407): a, c, g or t
  modified_base (2511566)..(2511570): a, c, g or t
  modified_base (2511643)..(2511643): a, c, g or t
  modified_base (2512041)..(2512045): a, c, g or t
  modified_base (2512049)..(2512049): a, c, g or t
  modified_base (2513078)..(2513078): a, c, g or t
  modified_base (2513253)..(2513253): a, c, g or t
  modified_base (2513543)..(2513543): a, c, g or t
  modified_base (2514290)..(2514290): a, c, g or t
  modified_base (2515213)..(2515214): a, c, g or t
  modified_base (2515216)..(2515222): a, c, g or t
  modified_base (2515272)..(2515280): a, c, g or t
  modified_base (2515285)..(2515288): a, c, g or t
  modified_base (2516358)..(2516358): a, c, g or t
  modified_base (2516475)..(2516475): a, c, g or t
  modified_base (2516722)..(2516726): a, c, g or t
  modified_base (2516900)..(2516903): a, c, g or t
  modified_base (2517311)..(2517312): a, c, g or t
  modified_base (2519031)..(2519031): a, c, g or t
  modified_base (2520332)..(2520333): a, c, g or t
  modified_base (2520335)..(2520336): a, c, g or t
  modified_base (2521235)..(2521236): a, c, g or t
  modified_base (2522202)..(2522202): a, c, g or t
  modified_base (2522561)..(2522561): a, c, g or t
  modified_base (2523106)..(2523107): a, c, g or t
  modified_base (2523255)..(2523256): a, c, g or t
  modified_base (2523262)..(2523264): a, c, g or t
  modified_base (2523312)..(2523314): a, c, g or t
  modified_base (2523316)..(2523317): a, c, g or t
  modified_base (2523325)..(2523326): a, c, g or t
  modified_base (2524131)..(2524131): a, c, g or t
  modified_base (2524560)..(2524566): a, c, g or t
  modified_base (2524687)..(2524690): a, c, g or t
  modified_base (2525207)..(2525207): a, c, g or t
  modified_base (2525681)..(2525681): a, c, g or t
  modified_base (2526598)..(2526598): a, c, g or t
  modified_base (2526672)..(2526677): a, c, g or t
  modified_base (2528643)..(2528643): a, c, g or t
  modified_base (2528679)..(2528725): a, c, g or t
  modified_base (2528768)..(2528769): a, c, g or t
  modified_base (2528773)..(2528774): a, c, g or t
  modified_base (2529244)..(2529244): a, c, g or t
  modified_base (2530175)..(2530175): a, c, g or t
  modified_base (2531843)..(2531843): a, c, g or t
  modified_base (2532702)..(2532702): a, c, g or t
  modified_base (2533937)..(2533937): a, c, g or t
  modified_base (2533967)..(2533967): a, c, g or t
  modified_base (2534196)..(2534196): a, c, g or t
  modified_base (2535136)..(2535136): a, c, g or t
  modified_base (2535140)..(2535141): a, c, g or t
  modified_base (2535147)..(2535148): a, c, g or t
  modified_base (2535213)..(2535213): a, c, g or t
  modified_base (2535217)..(2535218): a, c, g or t
  modified_base (2535220)..(2535221): a, c, g or t
  modified_base (2535225)..(2535228): a, c, g or t
  modified_base (2535318)..(2535321): a, c, g or t
  modified_base (2535357)..(2535357): a, c, g or t
  modified_base (2535360)..(2535360): a, c, g or t
  modified_base (2535364)..(2535376): a, c, g or t
  modified_base (2535575)..(2535614): a, c, g or t
  modified_base (2535616)..(2535617): a, c, g or t
  modified_base (2535671)..(2535672): a, c, g or t
  modified_base (2535678)..(2535728): a, c, g or t
  modified_base (2535739)..(2535740): a, c, g or t
  modified_base (2535743)..(2535744): a, c, g or t
  modified_base (2535752)..(2535773): a, c, g or t
  modified_base (2535775)..(2535776): a, c, g or t
  modified_base (2535780)..(2535781): a, c, g or t
  modified_base (2535796)..(2535797): a, c, g or t
  modified_base (2535803)..(2535804): a, c, g or t
  modified_base (2535817)..(2535819): a, c, g or t
  modified_base (2535867)..(2535934): a, c, g or t
  modified_base (2535941)..(2535941): a, c, g or t
  modified_base (2535958)..(2536043): a, c, g or t
  modified_base (2536795)..(2536795): a, c, g or t
  modified_base (2537967)..(2537970): a, c, g or t
  modified_base (2538177)..(2538181): a, c, g or t
  modified_base (2538363)..(2538366): a, c, g or t
  modified_base (2538433)..(2538433): a, c, g or t
  modified_base (2539027)..(2539028): a, c, g or t
  modified_base (2539599)..(2539599): a, c, g or t
  modified_base (2540057)..(2540061): a, c, g or t
  modified_base (2540756)..(2540759): a, c, g or t
  modified_base (2541642)..(2541642): a, c, g or t
  modified_base (2541705)..(2541705): a, c, g or t
  modified_base (2544698)..(2544701): a, c, g or t
  modified_base (2545215)..(2545218): a, c, g or t
  modified_base (2545817)..(2545817): a, c, g or t
  modified_base (2545890)..(2545891): a, c, g or t
  modified_base (2548138)..(2548141): a, c, g or t
  modified_base (2548176)..(2548179): a, c, g or t
  modified_base (2548537)..(2548538): a, c, g or t
  modified_base (2548885)..(2548885): a, c, g or t
  modified_base (2548911)..(2548911): a, c, g or t
  modified_base (2548933)..(2548952): a, c, g or t
  modified_base (2549421)..(2549424): a, c, g or t
  modified_base (2549629)..(2549629): a, c, g or t
  modified_base (2549790)..(2549834): a, c, g or t
  modified_base (2549933)..(2549938): a, c, g or t
  modified_base (2549940)..(2549988): a, c, g or t
  modified_base (2550040)..(2550040): a, c, g or t
  modified_base (2550082)..(2550082): a, c, g or t
  modified_base (2550112)..(2550112): a, c, g or t
  modified_base (2550161)..(2550161): a, c, g or t
  modified_base (2550188)..(2550188): a, c, g or t
  modified_base (2550219)..(2550219): a, c, g or t
  modified_base (2550287)..(2550287): a, c, g or t
  modified_base (2550314)..(2550314): a, c, g or t
  modified_base (2550343)..(2550343): a, c, g or t
  modified_base (2550446)..(2550454): a, c, g or t
  modified_base (2550529)..(2550530): a, c, g or t
  modified_base (2550707)..(2550707): a, c, g or t
  modified_base (2550709)..(2550729): a, c, g or t
  modified_base (2550760)..(2550761): a, c, g or t
  modified_base (2550764)..(2550804): a, c, g or t
  modified_base (2550883)..(2550886): a, c, g or t
  modified_base (2550888)..(2550891): a, c, g or t
  modified_base (2550893)..(2550893): a, c, g or t
  modified_base (2550929)..(2550973): a, c, g or t
  modified_base (2551023)..(2551025): a, c, g or t
  modified_base (2551068)..(2551071): a, c, g or t
  modified_base (2551096)..(2551097): a, c, g or t
  modified_base (2551110)..(2551110): a, c, g or t
  modified_base (2551137)..(2551137): a, c, g or t
  modified_base (2551182)..(2551182): a, c, g or t
  modified_base (2551212)..(2551263): a, c, g or t
  modified_base (2551297)..(2551340): a, c, g or t
  modified_base (2551342)..(2551344): a, c, g or t
  modified_base (2551368)..(2551369): a, c, g or t
  modified_base (2551371)..(2551373): a, c, g or t
  modified_base (2551406)..(2551461): a, c, g or t
  modified_base (2551507)..(2551508): a, c, g or t
  modified_base (2551511)..(2551513): a, c, g or t
  modified_base (2551543)..(2551551): a, c, g or t
  modified_base (2551557)..(2551559): a, c, g or t
  modified_base (2551578)..(2551579): a, c, g or t
  modified_base (2551632)..(2551633): a, c, g or t
  modified_base (2551638)..(2551667): a, c, g or t
  modified_base (2551669)..(2551670): a, c, g or t
  modified_base (2551695)..(2551784): a, c, g or t
  modified_base (2551800)..(2551800): a, c, g or t
  modified_base (2551826)..(2551840): a, c, g or t
  modified_base (2551864)..(2551864): a, c, g or t
  modified_base (2551867)..(2551868): a, c, g or t
  modified_base (2551886)..(2551887): a, c, g or t
  modified_base (2551940)..(2551941): a, c, g or t
  modified_base (2551943)..(2551944): a, c, g or t
  modified_base (2551947)..(2551950): a, c, g or t
  modified_base (2551969)..(2551990): a, c, g or t
  modified_base (2552015)..(2552021): a, c, g or t
  modified_base (2552024)..(2552025): a, c, g or t
  modified_base (2552042)..(2552050): a, c, g or t
  modified_base (2552174)..(2552174): a, c, g or t
  modified_base (2552203)..(2552203): a, c, g or t
  modified_base (2552257)..(2552257): a, c, g or t
  modified_base (2552270)..(2552270): a, c, g or t
  modified_base (2552304)..(2552305): a, c, g or t
  modified_base (2552309)..(2552310): a, c, g or t
  modified_base (2552314)..(2552315): a, c, g or t
  modified_base (2552317)..(2552371): a, c, g or t
  modified_base (2552410)..(2552410): a, c, g or t
  modified_base (2552414)..(2552414): a, c, g or t
  modified_base (2552436)..(2552438): a, c, g or t
  modified_base (2552474)..(2552474): a, c, g or t
  modified_base (2552492)..(2552492): a, c, g or t
  modified_base (2552514)..(2552514): a, c, g or t
  modified_base (2552581)..(2552581): a, c, g or t
  modified_base (2552674)..(2552674): a, c, g or t
  modified_base (2552719)..(2552719): a, c, g or t
  modified_base (2552740)..(2552740): a, c, g or t
  modified_base (2552968)..(2552968): a, c, g or t
  modified_base (2552973)..(2552975): a, c, g or t
  modified_base (2553106)..(2553111): a, c, g or t
  modified_base (2553115)..(2553162): a, c, g or t
  modified_base (2553203)..(2553206): a, c, g or t
  modified_base (2553209)..(2553209): a, c, g or t
  modified_base (2553318)..(2553422): a, c, g or t
  modified_base (2553446)..(2553446): a, c, g or t
  modified_base (2553471)..(2553471): a, c, g or t
  modified_base (2553482)..(2553520): a, c, g or t
  modified_base (2553593)..(2553602): a, c, g or t
  modified_base (2553609)..(2553610): a, c, g or t
  modified_base (2553655)..(2553700): a, c, g or t
  modified_base (2553750)..(2553750): a, c, g or t
  modified_base (2553770)..(2553773): a, c, g or t
  modified_base (2553783)..(2553787): a, c, g or t
  modified_base (2553872)..(2553872): a, c, g or t
  modified_base (2553877)..(2553878): a, c, g or t
  modified_base (2553917)..(2553920): a, c, g or t
  modified_base (2553925)..(2553942): a, c, g or t
  modified_base (2554019)..(2554021): a, c, g or t
  modified_base (2554109)..(2554109): a, c, g or t
  modified_base (2554116)..(2554135): a, c, g or t
  modified_base (2554193)..(2554230): a, c, g or t
  modified_base (2554324)..(2554330): a, c, g or t
  modified_base (2554334)..(2554335): a, c, g or t
  modified_base (2554422)..(2554422): a, c, g or t
  modified_base (2554427)..(2554429): a, c, g or t
  modified_base (2554616)..(2554617): a, c, g or t
  modified_base (2554629)..(2554629): a, c, g or t
  modified_base (2554665)..(2554666): a, c, g or t
  modified_base (2554673)..(2554697): a, c, g or t
  modified_base (2554709)..(2554710): a, c, g or t
  modified_base (2554721)..(2554733): a, c, g or t
  modified_base (2554749)..(2554750): a, c, g or t
  modified_base (2554779)..(2554781): a, c, g or t
  modified_base (2554783)..(2554783): a, c, g or t
  modified_base (2554795)..(2554795): a, c, g or t
  modified_base (2554878)..(2554878): a, c, g or t
  modified_base (2554965)..(2554965): a, c, g or t
  modified_base (2555022)..(2555029): a, c, g or t
  modified_base (2555055)..(2555055): a, c, g or t
  modified_base (2555058)..(2555058): a, c, g or t
  modified_base (2555166)..(2555166): a, c, g or t
  modified_base (2555175)..(2555175): a, c, g or t
  modified_base (2555392)..(2555395): a, c, g or t
  modified_base (2555402)..(2555445): a, c, g or t
  modified_base (2555528)..(2555572): a, c, g or t
  modified_base (2555598)..(2555598): a, c, g or t
  modified_base (2555621)..(2555621): a, c, g or t
  modified_base (2555630)..(2555630): a, c, g or t
  modified_base (2555637)..(2555637): a, c, g or t
  modified_base (2555754)..(2555754): a, c, g or t
  modified_base (2555757)..(2555757): a, c, g or t
  modified_base (2555779)..(2555822): a, c, g or t
  modified_base (2555824)..(2555824): a, c, g or t
  modified_base (2555854)..(2555854): a, c, g or t
  modified_base (2555873)..(2555914): a, c, g or t
  modified_base (2556000)..(2556002): a, c, g or t
  modified_base (2556161)..(2556167): a, c, g or t
  modified_base (2556273)..(2556273): a, c, g or t
  modified_base (2556276)..(2556374): a, c, g or t
  modified_base (2556506)..(2556508): a, c, g or t
  modified_base (2556703)..(2556703): a, c, g or t
  modified_base (2556758)..(2556758): a, c, g or t
  modified_base (2556768)..(2556768): a, c, g or t
  modified_base (2556793)..(2556857): a, c, g or t
  modified_base (2556884)..(2556937): a, c, g or t
  modified_base (2556943)..(2556943): a, c, g or t
  modified_base (2556953)..(2556954): a, c, g or t
  modified_base (2556965)..(2556966): a, c, g or t
  modified_base (2556973)..(2556973): a, c, g or t
  modified_base (2556982)..(2556982): a, c, g or t
  modified_base (2556985)..(2556986): a, c, g or t
  modified_base (2556993)..(2557001): a, c, g or t
  modified_base (2557030)..(2557074): a, c, g or t
  modified_base (2557140)..(2557246): a, c, g or t
  modified_base (2557249)..(2557250): a, c, g or t
  modified_base (2557331)..(2557331): a, c, g or t
  modified_base (2557344)..(2557345): a, c, g or t
  modified_base (2557349)..(2557350): a, c, g or t
  modified_base (2557358)..(2557424): a, c, g or t
  modified_base (2557501)..(2557502): a, c, g or t
  modified_base (2557595)..(2557730): a, c, g or t
  modified_base (2557744)..(2557744): a, c, g or t
  modified_base (2557760)..(2557780): a, c, g or t
  modified_base (2557835)..(2557841): a, c, g or t
  modified_base (2557844)..(2557844): a, c, g or t
  modified_base (2557866)..(2557867): a, c, g or t
  modified_base (2557913)..(2557913): a, c, g or t
  modified_base (2557928)..(2557928): a, c, g or t
  modified_base (2557946)..(2557947): a, c, g or t
  modified_base (2558002)..(2558002): a, c, g or t
  modified_base (2558048)..(2558089): a, c, g or t
  modified_base (2558117)..(2558117): a, c, g or t
  modified_base (2558125)..(2558139): a, c, g or t
  modified_base (2558192)..(2558233): a, c, g or t
  modified_base (2558245)..(2558245): a, c, g or t
  modified_base (2558319)..(2558321): a, c, g or t
  modified_base (2558323)..(2558323): a, c, g or t
  modified_base (2558338)..(2558338): a, c, g or t
  modified_base (2558375)..(2558417): a, c, g or t
  modified_base (2558445)..(2558445): a, c, g or t
  modified_base (2558499)..(2558550): a, c, g or t
  modified_base (2558594)..(2558595): a, c, g or t
  modified_base (2558599)..(2558601): a, c, g or t
  modified_base (2558603)..(2558648): a, c, g or t
  modified_base (2558650)..(2558651): a, c, g or t
  modified_base (2558662)..(2558662): a, c, g or t
  modified_base (2558669)..(2558707): a, c, g or t
  modified_base (2558753)..(2558793): a, c, g or t
  modified_base (2558894)..(2558894): a, c, g or t
  modified_base (2558903)..(2558946): a, c, g or t
  modified_base (2558971)..(2558971): a, c, g or t
  modified_base (2558973)..(2559014): a, c, g or t
  modified_base (2559062)..(2559101): a, c, g or t
  modified_base (2559151)..(2559151): a, c, g or t
  modified_base (2559193)..(2559196): a, c, g or t
  modified_base (2559348)..(2559352): a, c, g or t
  modified_base (2559355)..(2559392): a, c, g or t
  modified_base (2559394)..(2559394): a, c, g or t
  modified_base (2559421)..(2559421): a, c, g or t
  modified_base (2559442)..(2559483): a, c, g or t
  modified_base (2559509)..(2559512): a, c, g or t
  modified_base (2559518)..(2559576): a, c, g or t
  modified_base (2559606)..(2559608): a, c, g or t
  modified_base (2559612)..(2559655): a, c, g or t
  modified_base (2559712)..(2559753): a, c, g or t
  modified_base (2559774)..(2559813): a, c, g or t
  modified_base (2559861)..(2559861): a, c, g or t
  modified_base (2559952)..(2559952): a, c, g or t
  modified_base (2559961)..(2560000): a, c, g or t
  modified_base (2560223)..(2560224): a, c, g or t
  modified_base (2560226)..(2560227): a, c, g or t
  modified_base (2560229)..(2560281): a, c, g or t
  modified_base (2560304)..(2560345): a, c, g or t
  modified_base (2560348)..(2560348): a, c, g or t
  modified_base (2560376)..(2560420): a, c, g or t
  modified_base (2560479)..(2560520): a, c, g or t
  modified_base (2560657)..(2560662): a, c, g or t
  modified_base (2561599)..(2561600): a, c, g or t
  modified_base (2561992)..(2561995): a, c, g or t
  modified_base (2561997)..(2561998): a, c, g or t
  modified_base (2562007)..(2562008): a, c, g or t
  modified_base (2562012)..(2562013): a, c, g or t
  modified_base (2562188)..(2562188): a, c, g or t
  modified_base (2562193)..(2562232): a, c, g or t
  modified_base (2562876)..(2562877): a, c, g or t
  modified_base (2562996)..(2563035): a, c, g or t
  modified_base (2563204)..(2563250): a, c, g or t
  modified_base (2563325)..(2563329): a, c, g or t
  modified_base (2563365)..(2563406): a, c, g or t
  modified_base (2563426)..(2563466): a, c, g or t
  modified_base (2563512)..(2563512): a, c, g or t
  modified_base (2563519)..(2563559): a, c, g or t
  modified_base (2563563)..(2563563): a, c, g or t
  modified_base (2563588)..(2563627): a, c, g or t
  modified_base (2563658)..(2563697): a, c, g or t
  modified_base (2563814)..(2563817): a, c, g or t
  modified_base (2563938)..(2563946): a, c, g or t
  modified_base (2563949)..(2563952): a, c, g or t
  modified_base (2564003)..(2564006): a, c, g or t
  modified_base (2564014)..(2564079): a, c, g or t
  modified_base (2564203)..(2564242): a, c, g or t
  modified_base (2564264)..(2564313): a, c, g or t
  modified_base (2564343)..(2564346): a, c, g or t
  modified_base (2564382)..(2564383): a, c, g or t
  modified_base (2564387)..(2564396): a, c, g or t
  modified_base (2564441)..(2564491): a, c, g or t
  modified_base (2564524)..(2564565): a, c, g or t
  modified_base (2564611)..(2564652): a, c, g or t
  modified_base (2564658)..(2564660): a, c, g or t
  modified_base (2564676)..(2564677): a, c, g or t
  modified_base (2564778)..(2564836): a, c, g or t
  modified_base (2564903)..(2564951): a, c, g or t
  modified_base (2564953)..(2564954): a, c, g or t
  modified_base (2564973)..(2565039): a, c, g or t
  modified_base (2565081)..(2565082): a, c, g or t
  modified_base (2565115)..(2565115): a, c, g or t
  modified_base (2565143)..(2565145): a, c, g or t
  modified_base (2565148)..(2565149): a, c, g or t
  modified_base (2565166)..(2565175): a, c, g or t
  modified_base (2565202)..(2565249): a, c, g or t
  modified_base (2565287)..(2565326): a, c, g or t
  modified_base (2565362)..(2565363): a, c, g or t
  modified_base (2565371)..(2565433): a, c, g or t
  modified_base (2565461)..(2565461): a, c, g or t
  modified_base (2565470)..(2565474): a, c, g or t
  modified_base (2565517)..(2565561): a, c, g or t
  modified_base (2565612)..(2572472): a, c, g or t
  modified_base (2572475)..(2572475): a, c, g or t
  modified_base (2572541)..(2572554): a, c, g or t
  modified_base (2572565)..(2572566): a, c, g or t
  modified_base (2572594)..(2572665): a, c, g or t
  modified_base (2572709)..(2572710): a, c, g or t
  modified_base (2572712)..(2572787): a, c, g or t
  modified_base (2572810)..(2572811): a, c, g or t
  modified_base (2572855)..(2572894): a, c, g or t
  modified_base (2572918)..(2572966): a, c, g or t
  modified_base (2572976)..(2572976): a, c, g or t
  modified_base (2572994)..(2573011): a, c, g or t
  modified_base (2573025)..(2573026): a, c, g or t
  modified_base (2573060)..(2573077): a, c, g or t
  modified_base (2573116)..(2573118): a, c, g or t
  modified_base (2573123)..(2573123): a, c, g or t
  modified_base (2573149)..(2573214): a, c, g or t
  modified_base (2573238)..(2573314): a, c, g or t
  modified_base (2573316)..(2573316): a, c, g or t
  modified_base (2573347)..(2573403): a, c, g or t
  modified_base (2573482)..(2573484): a, c, g or t
  modified_base (2573573)..(2573573): a, c, g or t
  modified_base (2573587)..(2573587): a, c, g or t
  modified_base (2573589)..(2573590): a, c, g or t
  modified_base (2573621)..(2573621): a, c, g or t
  modified_base (2573652)..(2573652): a, c, g or t
  modified_base (2573662)..(2573662): a, c, g or t
  modified_base (2573667)..(2573667): a, c, g or t
  modified_base (2573674)..(2573674): a, c, g or t
  modified_base (2573770)..(2573770): a, c, g or t
  modified_base (2573803)..(2573806): a, c, g or t
  modified_base (2573854)..(2573858): a, c, g or t
  modified_base (2573892)..(2573937): a, c, g or t
  modified_base (2573943)..(2573943): a, c, g or t
  modified_base (2573957)..(2573966): a, c, g or t
  modified_base (2573980)..(2573980): a, c, g or t
  modified_base (2574111)..(2574156): a, c, g or t
  modified_base (2574204)..(2574204): a, c, g or t
  modified_base (2574207)..(2574208): a, c, g or t
  modified_base (2574220)..(2574248): a, c, g or t
  modified_base (2574292)..(2574353): a, c, g or t
  modified_base (2574405)..(2574405): a, c, g or t
  modified_base (2574432)..(2574474): a, c, g or t
  modified_base (2574482)..(2574482): a, c, g or t
  modified_base (2574533)..(2574533): a, c, g or t
  modified_base (2574548)..(2574548): a, c, g or t
  modified_base (2574557)..(2574557): a, c, g or t
  modified_base (2574583)..(2574620): a, c, g or t
  modified_base (2574629)..(2574629): a, c, g or t
  modified_base (2574641)..(2574682): a, c, g or t
  modified_base (2574727)..(2574777): a, c, g or t
  modified_base (2574827)..(2574827): a, c, g or t
  modified_base (2574846)..(2574846): a, c, g or t
  modified_base (2574901)..(2574940): a, c, g or t
  modified_base (2574968)..(2574968): a, c, g or t
  modified_base (2575019)..(2575020): a, c, g or t
  modified_base (2575115)..(2575155): a, c, g or t
  modified_base (2575205)..(2575208): a, c, g or t
  modified_base (2575336)..(2575377): a, c, g or t
  modified_base (2575444)..(2575487): a, c, g or t
  modified_base (2575593)..(2575593): a, c, g or t
  modified_base (2575685)..(2575726): a, c, g or t
  modified_base (2575803)..(2575842): a, c, g or t
  modified_base (2575945)..(2575948): a, c, g or t
  modified_base (2575954)..(2575957): a, c, g or t
  modified_base (2575981)..(2576022): a, c, g or t
  modified_base (2576051)..(2576051): a, c, g or t
  modified_base (2576192)..(2576198): a, c, g or t
  modified_base (2576200)..(2576232): a, c, g or t
  modified_base (2576240)..(2576241): a, c, g or t
  modified_base (2576308)..(2576351): a, c, g or t
  modified_base (2576403)..(2576416): a, c, g or t
  modified_base (2576444)..(2576444): a, c, g or t
  modified_base (2576448)..(2576485): a, c, g or t
  modified_base (2576786)..(2576802): a, c, g or t
  modified_base (2576885)..(2576885): a, c, g or t
  modified_base (2576918)..(2576966): a, c, g or t
  modified_base (2576972)..(2576973): a, c, g or t
  modified_base (2576983)..(2576983): a, c, g or t
  modified_base (2576989)..(2576991): a, c, g or t
  modified_base (2577002)..(2577002): a, c, g or t
  modified_base (2577065)..(2577065): a, c, g or t
  modified_base (2577092)..(2577092): a, c, g or t
  modified_base (2577223)..(2577223): a, c, g or t
  modified_base (2577281)..(2577282): a, c, g or t
  modified_base (2577353)..(2577353): a, c, g or t
  modified_base (2577356)..(2577394): a, c, g or t
  modified_base (2577405)..(2577408): a, c, g or t
  modified_base (2577418)..(2577490): a, c, g or t
  modified_base (2577502)..(2577502): a, c, g or t
  modified_base (2577605)..(2577656): a, c, g or t
  modified_base (2577720)..(2577761): a, c, g or t
  modified_base (2577789)..(2577793): a, c, g or t
  modified_base (2577812)..(2577813): a, c, g or t
  modified_base (2577816)..(2577820): a, c, g or t
  modified_base (2577822)..(2577867): a, c, g or t
  modified_base (2577879)..(2577880): a, c, g or t
  modified_base (2577939)..(2577998): a, c, g or t
  modified_base (2578029)..(2578033): a, c, g or t
  modified_base (2578077)..(2578121): a, c, g or t
  modified_base (2578179)..(2578220): a, c, g or t
  modified_base (2578244)..(2578388): a, c, g or t
  modified_base (2578414)..(2578453): a, c, g or t
  modified_base (2578474)..(2578513): a, c, g or t
  modified_base (2578553)..(2578553): a, c, g or t
  modified_base (2578589)..(2578589): a, c, g or t
  modified_base (2578610)..(2578613): a, c, g or t
  modified_base (2578660)..(2578663): a, c, g or t
  modified_base (2578691)..(2578691): a, c, g or t
  modified_base (2578723)..(2578762): a, c, g or t
  modified_base (2578794)..(2578834): a, c, g or t
  modified_base (2578979)..(2578979): a, c, g or t
  modified_base (2579009)..(2579048): a, c, g or t
  modified_base (2579053)..(2579053): a, c, g or t
  modified_base (2579210)..(2579210): a, c, g or t
  modified_base (2579235)..(2579235): a, c, g or t
  modified_base (2579237)..(2579277): a, c, g or t
  modified_base (2579327)..(2579366): a, c, g or t
  modified_base (2579390)..(2579431): a, c, g or t
  modified_base (2579521)..(2579521): a, c, g or t
  modified_base (2579619)..(2579656): a, c, g or t
  modified_base (2579676)..(2579722): a, c, g or t
  modified_base (2579751)..(2579751): a, c, g or t
  modified_base (2579778)..(2579816): a, c, g or t
  modified_base (2579908)..(2579947): a, c, g or t
  modified_base (2579968)..(2580009): a, c, g or t
  modified_base (2580084)..(2580123): a, c, g or t
  modified_base (2580174)..(2580174): a, c, g or t
  modified_base (2580178)..(2580220): a, c, g or t
  modified_base (2580319)..(2580356): a, c, g or t
  modified_base (2580380)..(2580422): a, c, g or t
  modified_base (2580460)..(2580460): a, c, g or t
  modified_base (2580559)..(2580598): a, c, g or t
  modified_base (2580703)..(2580706): a, c, g or t
  modified_base (2580751)..(2580793): a, c, g or t
  modified_base (2580838)..(2580838): a, c, g or t
  modified_base (2581117)..(2581156): a, c, g or t
  modified_base (2581246)..(2581287): a, c, g or t
  modified_base (2581947)..(2581953): a, c, g or t
  modified_base (2582276)..(2582277): a, c, g or t
  modified_base (2582287)..(2582288): a, c, g or t
  modified_base (2583843)..(2583844): a, c, g or t
  modified_base (2583846)..(2583848): a, c, g or t
  modified_base (2583914)..(2583915): a, c, g or t
  modified_base (2583917)..(2583919): a, c, g or t
  modified_base (2583921)..(2583924): a, c, g or t
  modified_base (2583956)..(2583957): a, c, g or t
  modified_base (2583963)..(2583971): a, c, g or t
  modified_base (2584038)..(2584059): a, c, g or t
  modified_base (2584061)..(2584064): a, c, g or t
  modified_base (2584083)..(2584134): a, c, g or t
  modified_base (2584164)..(2584167): a, c, g or t
  modified_base (2584231)..(2584232): a, c, g or t
  modified_base (2584236)..(2584237): a, c, g or t
  modified_base (2584239)..(2584240): a, c, g or t
  modified_base (2584271)..(2584288): a, c, g or t
  modified_base (2584330)..(2584343): a, c, g or t
  modified_base (2584366)..(2584399): a, c, g or t
  modified_base (2584420)..(2584421): a, c, g or t
  modified_base (2584423)..(2584426): a, c, g or t
  modified_base (2584429)..(2584429): a, c, g or t
  modified_base (2584445)..(2584446): a, c, g or t
  modified_base (2584450)..(2585393): a, c, g or t
  modified_base (2585398)..(2585400): a, c, g or t
  modified_base (2585409)..(2585410): a, c, g or t
  modified_base (2585417)..(2585463): a, c, g or t
  modified_base (2585465)..(2585466): a, c, g or t
  modified_base (2585487)..(2585859): a, c, g or t
  modified_base (2585868)..(2585869): a, c, g or t
  modified_base (2585871)..(2585872): a, c, g or t
  modified_base (2585883)..(2586004): a, c, g or t
  modified_base (2586025)..(2586026): a, c, g or t
  modified_base (2586028)..(2586036): a, c, g or t
  modified_base (2586060)..(2586096): a, c, g or t
  modified_base (2586098)..(2586099): a, c, g or t
  modified_base (2586114)..(2586115): a, c, g or t
  modified_base (2586120)..(2586153): a, c, g or t
  modified_base (2586207)..(2586223): a, c, g or t
  modified_base (2586227)..(2586228): a, c, g or t
  modified_base (2586230)..(2586231): a, c, g or t
  modified_base (2586236)..(2586237): a, c, g or t
  modified_base (2586245)..(2586248): a, c, g or t
  modified_base (2586272)..(2586497): a, c, g or t
  modified_base (2586511)..(2586512): a, c, g or t
  modified_base (2586521)..(2586647): a, c, g or t
  modified_base (2586671)..(2586738): a, c, g or t
  modified_base (2586740)..(2586741): a, c, g or t
  modified_base (2586761)..(2587455): a, c, g or t
  modified_base (2587479)..(2587864): a, c, g or t
  modified_base (2587866)..(2587867): a, c, g or t
  modified_base (2587888)..(2588080): a, c, g or t
  modified_base (2588082)..(2588083): a, c, g or t
  modified_base (2588085)..(2588085): a, c, g or t
  modified_base (2588104)..(2588147): a, c, g or t
  modified_base (2588171)..(2588342): a, c, g or t
  modified_base (2588351)..(2588354): a, c, g or t
  modified_base (2588366)..(2588397): a, c, g or t
  modified_base (2588402)..(2588402): a, c, g or t
  modified_base (2588421)..(2588485): a, c, g or t
  modified_base (2588514)..(2588518): a, c, g or t
  modified_base (2588523)..(2588524): a, c, g or t
  modified_base (2588545)..(2588545): a, c, g or t
  modified_base (2588547)..(2588548): a, c, g or t
  modified_base (2588552)..(2588555): a, c, g or t
  modified_base (2588557)..(2588570): a, c, g or t
  modified_base (2588603)..(2588609): a, c, g or t
  modified_base (2588611)..(2588612): a, c, g or t
  modified_base (2588615)..(2588616): a, c, g or t
  modified_base (2588643)..(2588697): a, c, g or t
  modified_base (2588755)..(2588755): a, c, g or t
  modified_base (2588802)..(2588842): a, c, g or t
  modified_base (2588949)..(2588952): a, c, g or t
  modified_base (2589014)..(2589053): a, c, g or t
  modified_base (2589098)..(2589098): a, c, g or t
  modified_base (2589107)..(2589107): a, c, g or t
  modified_base (2589133)..(2589134): a, c, g or t
  modified_base (2589136)..(2589175): a, c, g or t
  modified_base (2589824)..(2589832): a, c, g or t
  modified_base (2590717)..(2590717): a, c, g or t
  modified_base (2591269)..(2591269): a, c, g or t
  modified_base (2591496)..(2591498): a, c, g or t
  modified_base (2591858)..(2591862): a, c, g or t
  modified_base (2592266)..(2592266): a, c, g or t
  modified_base (2595465)..(2595465): a, c, g or t
  modified_base (2595887)..(2595887): a, c, g or t
  modified_base (2596133)..(2596136): a, c, g or t
  modified_base (2597686)..(2597686): a, c, g or t
  modified_base (2600297)..(2600300): a, c, g or t
  modified_base (2600698)..(2600698): a, c, g or t
  modified_base (2601344)..(2601347): a, c, g or t
  modified_base (2602650)..(2602650): a, c, g or t
  modified_base (2603784)..(2603784): a, c, g or t
  modified_base (2604546)..(2604546): a, c, g or t
  modified_base (2604621)..(2604621): a, c, g or t
  modified_base (2604735)..(2604735): a, c, g or t
  modified_base (2605398)..(2605398): a, c, g or t
  modified_base (2605651)..(2605651): a, c, g or t
  modified_base (2606680)..(2606680): a, c, g or t
  modified_base (2607538)..(2607538): a, c, g or t
  modified_base (2607545)..(2607545): a, c, g or t
  modified_base (2607887)..(2607887): a, c, g or t
  modified_base (2608235)..(2608238): a, c, g or t
  modified_base (2612712)..(2612712): a, c, g or t
  modified_base (2615293)..(2615293): a, c, g or t
  modified_base (2615874)..(2615874): a, c, g or t
  modified_base (2616178)..(2616178): a, c, g or t
  modified_base (2616264)..(2616271): a, c, g or t
  modified_base (2616937)..(2616937): a, c, g or t
  modified_base (2619084)..(2619084): a, c, g or t
  modified_base (2620102)..(2620102): a, c, g or t
  modified_base (2620104)..(2620105): a, c, g or t
  modified_base (2620125)..(2620126): a, c, g or t
  modified_base (2620313)..(2620313): a, c, g or t
  modified_base (2620998)..(2620998): a, c, g or t
  modified_base (2621461)..(2621461): a, c, g or t
  modified_base (2622781)..(2622784): a, c, g or t
  modified_base (2623968)..(2623971): a, c, g or t
  modified_base (2624056)..(2624060): a, c, g or t
  modified_base (2624064)..(2624064): a, c, g or t
  modified_base (2625919)..(2625927): a, c, g or t
  modified_base (2627617)..(2627617): a, c, g or t
  modified_base (2628955)..(2628955): a, c, g or t
  modified_base (2631808)..(2631808): a, c, g or t
  modified_base (2634102)..(2634108): a, c, g or t
  modified_base (2634126)..(2634126): a, c, g or t
  modified_base (2634475)..(2634475): a, c, g or t
  modified_base (2634996)..(2634996): a, c, g or t
  modified_base (2635588)..(2635588): a, c, g or t
  modified_base (2635685)..(2635685): a, c, g or t
  modified_base (2638818)..(2638818): a, c, g or t
  modified_base (2641438)..(2641439): a, c, g or t
  modified_base (2641442)..(2641442): a, c, g or t
  modified_base (2641693)..(2641693): a, c, g or t
  modified_base (2641700)..(2641701): a, c, g or t
  modified_base (2646238)..(2646238): a, c, g or t
  modified_base (2653096)..(2653096): a, c, g or t
  modified_base (2653412)..(2653415): a, c, g or t
  modified_base (2654095)..(2654100): a, c, g or t
  modified_base (2655196)..(2655196): a, c, g or t
  modified_base (2657335)..(2657335): a, c, g or t
  modified_base (2658189)..(2658189): a, c, g or t
  modified_base (2658679)..(2658679): a, c, g or t
  modified_base (2660753)..(2660753): a, c, g or t
  modified_base (2660845)..(2660845): a, c, g or t
  modified_base (2662287)..(2662287): a, c, g or t
  modified_base (2663867)..(2663867): a, c, g or t
  modified_base (2665769)..(2665770): a, c, g or t
  modified_base (2666365)..(2666365): a, c, g or t
  modified_base (2667092)..(2667095): a, c, g or t
  modified_base (2669279)..(2669279): a, c, g or t
  modified_base (2671111)..(2671111): a, c, g or t
  modified_base (2672465)..(2672468): a, c, g or t
  modified_base (2673824)..(2673824): a, c, g or t
  modified_base (2674550)..(2674553): a, c, g or t
  modified_base (2675028)..(2675034): a, c, g or t
  modified_base (2677550)..(2677550): a, c, g or t
  modified_base (2677807)..(2677807): a, c, g or t
  modified_base (2678761)..(2678761): a, c, g or t
  modified_base (2679936)..(2679936): a, c, g or t
  modified_base (2680399)..(2680399): a, c, g or t
  modified_base (2680448)..(2680448): a, c, g or t
  modified_base (2681185)..(2681185): a, c, g or t
  modified_base (2682659)..(2682666): a, c, g or t
  modified_base (2683174)..(2683174): a, c, g or t
  modified_base (2684221)..(2684221): a, c, g or t
  modified_base (2687017)..(2687017): a, c, g or t
  modified_base (2688299)..(2688302): a, c, g or t
  modified_base (2688304)..(2688305): a, c, g or t
  modified_base (2688407)..(2688407): a, c, g or t
  modified_base (2694913)..(2694916): a, c, g or t
  modified_base (2696249)..(2696249): a, c, g or t
  modified_base (2696633)..(2696638): a, c, g or t
  modified_base (2698225)..(2698225): a, c, g or t
  modified_base (2699078)..(2699078): a, c, g or t
  modified_base (2700464)..(2700464): a, c, g or t
  modified_base (2702574)..(2702574): a, c, g or t
  modified_base (2702781)..(2702781): a, c, g or t
  modified_base (2703230)..(2703230): a, c, g or t
  modified_base (2703499)..(2703499): a, c, g or t
  modified_base (2703769)..(2703769): a, c, g or t
  modified_base (2704716)..(2704717): a, c, g or t
  modified_base (2704727)..(2704732): a, c, g or t
  modified_base (2705434)..(2705439): a, c, g or t
  modified_base (2706235)..(2706235): a, c, g or t
  modified_base (2706255)..(2706255): a, c, g or t
  modified_base (2708264)..(2708269): a, c, g or t
  modified_base (2708440)..(2708440): a, c, g or t
  modified_base (2709083)..(2709083): a, c, g or t
  modified_base (2709713)..(2709713): a, c, g or t
  modified_base (2710868)..(2710868): a, c, g or t
  modified_base (2711820)..(2711823): a, c, g or t
  modified_base (2712885)..(2712885): a, c, g or t
  modified_base (2713039)..(2713039): a, c, g or t
  modified_base (2713109)..(2713109): a, c, g or t
  modified_base (2713877)..(2713877): a, c, g or t
  modified_base (2716801)..(2716801): a, c, g or t
  modified_base (2717060)..(2717060): a, c, g or t
  modified_base (2717089)..(2717089): a, c, g or t
  modified_base (2722378)..(2722380): a, c, g or t
  modified_base (2722382)..(2722384): a, c, g or t
  modified_base (2726426)..(2726431): a, c, g or t
  modified_base (2726522)..(2726530): a, c, g or t
  modified_base (2726812)..(2726812): a, c, g or t
  modified_base (2729726)..(2729726): a, c, g or t
  modified_base (2730828)..(2730828): a, c, g or t
  modified_base (2731400)..(2731400): a, c, g or t
  modified_base (2731404)..(2731405): a, c, g or t
  modified_base (2731780)..(2731780): a, c, g or t
  modified_base (2732206)..(2732214): a, c, g or t
  modified_base (2732396)..(2732399): a, c, g or t
  modified_base (2734412)..(2734412): a, c, g or t
  modified_base (2734445)..(2734445): a, c, g or t
  modified_base (2736492)..(2736492): a, c, g or t
  modified_base (2742150)..(2742150): a, c, g or t
  modified_base (2743416)..(2743417): a, c, g or t
  modified_base (2743453)..(2743461): a, c, g or t
  modified_base (2744118)..(2744118): a, c, g or t
  modified_base (2744224)..(2744224): a, c, g or t
  modified_base (2746051)..(2746051): a, c, g or t
  modified_base (2748517)..(2748517): a, c, g or t
  modified_base (2751669)..(2751669): a, c, g or t
  modified_base (2752653)..(2752653): a, c, g or t
  modified_base (2753603)..(2753603): a, c, g or t
  modified_base (2754306)..(2754306): a, c, g or t
  modified_base (2754441)..(2754441): a, c, g or t
  modified_base (2754732)..(2754735): a, c, g or t
  modified_base (2755397)..(2755397): a, c, g or t
  modified_base (2755796)..(2755796): a, c, g or t
  modified_base (2755838)..(2755838): a, c, g or t
  modified_base (2755898)..(2755898): a, c, g or t
  modified_base (2756067)..(2756067): a, c, g or t
  modified_base (2756070)..(2756070): a, c, g or t
  modified_base (2757202)..(2757202): a, c, g or t
  modified_base (2757258)..(2757258): a, c, g or t
  modified_base (2758260)..(2758260): a, c, g or t
  modified_base (2759762)..(2759769): a, c, g or t
  modified_base (2760370)..(2760370): a, c, g or t
  modified_base (2762701)..(2762701): a, c, g or t
  modified_base (2763400)..(2763400): a, c, g or t
  modified_base (2763756)..(2763756): a, c, g or t
  modified_base (2765927)..(2765927): a, c, g or t
  modified_base (2772324)..(2772324): a, c, g or t
  modified_base (2772328)..(2772330): a, c, g or t
  modified_base (2773642)..(2773642): a, c, g or t
  modified_base (2774083)..(2774083): a, c, g or t
  modified_base (2775077)..(2775077): a, c, g or t
  modified_base (2775080)..(2775080): a, c, g or t
  modified_base (2775609)..(2775609): a, c, g or t
  modified_base (2776064)..(2776067): a, c, g or t
  modified_base (2777691)..(2777691): a, c, g or t
  modified_base (2778192)..(2778192): a, c, g or t
  modified_base (2778936)..(2778936): a, c, g or t
  modified_base (2782999)..(2782999): a, c, g or t
  modified_base (2783491)..(2783491): a, c, g or t
  modified_base (2784049)..(2784049): a, c, g or t
  modified_base (2786184)..(2786184): a, c, g or t
  modified_base (2787283)..(2787283): a, c, g or t
  modified_base (2787285)..(2787285): a, c, g or t
  modified_base (2789274)..(2789274): a, c, g or t
  modified_base (2791452)..(2791452): a, c, g or t
  modified_base (2792787)..(2792787): a, c, g or t
  modified_base (2794972)..(2794972): a, c, g or t
  modified_base (2797100)..(2797100): a, c, g or t
  modified_base (2798129)..(2798129): a, c, g or t
  modified_base (2798149)..(2798149): a, c, g or t
  modified_base (2798204)..(2798204): a, c, g or t
  modified_base (2798446)..(2798446): a, c, g or t
  modified_base (2799861)..(2799861): a, c, g or t
  modified_base (2804375)..(2804380): a, c, g or t
  modified_base (2804382)..(2804383): a, c, g or t
  modified_base (2804388)..(2804389): a, c, g or t
  modified_base (2804406)..(2804406): a, c, g or t
  modified_base (2804410)..(2804415): a, c, g or t
  modified_base (2804466)..(2804478): a, c, g or t
  modified_base (2804488)..(2804491): a, c, g or t
  modified_base (2804503)..(2804504): a, c, g or t
  modified_base (2804517)..(2804574): a, c, g or t
  modified_base (2804576)..(2804576): a, c, g or t
  modified_base (2804661)..(2804665): a, c, g or t
  modified_base (2804672)..(2804673): a, c, g or t
  modified_base (2804676)..(2804677): a, c, g or t
  modified_base (2805020)..(2805020): a, c, g or t
  modified_base (2805950)..(2805950): a, c, g or t
  modified_base (2806135)..(2806142): a, c, g or t
  modified_base (2807875)..(2807882): a, c, g or t
  modified_base (2807886)..(2807886): a, c, g or t
  modified_base (2809471)..(2809471): a, c, g or t
  modified_base (2809905)..(2809905): a, c, g or t
  modified_base (2810399)..(2810399): a, c, g or t
  modified_base (2810985)..(2810985): a, c, g or t
  modified_base (2813645)..(2813645): a, c, g or t
  modified_base (2813809)..(2813809): a, c, g or t
  modified_base (2814445)..(2814445): a, c, g or t
  modified_base (2815006)..(2815006): a, c, g or t
  modified_base (2815025)..(2815033): a, c, g or t
  modified_base (2815035)..(2815036): a, c, g or t
  modified_base (2819401)..(2819401): a, c, g or t
  modified_base (2820034)..(2820034): a, c, g or t
  modified_base (2820210)..(2820210): a, c, g or t
  modified_base (2820684)..(2820685): a, c, g or t
  modified_base (2820825)..(2820825): a, c, g or t
  modified_base (2822462)..(2822462): a, c, g or t
  modified_base (2822961)..(2822961): a, c, g or t
  modified_base (2826201)..(2826201): a, c, g or t
  modified_base (2826865)..(2826869): a, c, g or t
  modified_base (2826879)..(2826879): a, c, g or t
  modified_base (2827136)..(2827136): a, c, g or t
  modified_base (2828268)..(2828268): a, c, g or t
  modified_base (2828867)..(2828867): a, c, g or t
  modified_base (2833078)..(2833078): a, c, g or t
  modified_base (2833513)..(2833513): a, c, g or t
  modified_base (2836821)..(2836823): a, c, g or t
  modified_base (2839300)..(2839300): a, c, g or t
  modified_base (2840544)..(2840545): a, c, g or t
  modified_base (2842198)..(2842200): a, c, g or t
  modified_base (2844250)..(2844250): a, c, g or t
  modified_base (2847565)..(2847570): a, c, g or t
  modified_base (2850212)..(2850212): a, c, g or t
  modified_base (2851535)..(2851539): a, c, g or t
  modified_base (2851541)..(2851541): a, c, g or t
  modified_base (2851570)..(2851575): a, c, g or t
  modified_base (2851798)..(2851798): a, c, g or t
  modified_base (2851803)..(2851806): a, c, g or t
  modified_base (2851809)..(2851812): a, c, g or t
  modified_base (2852153)..(2852153): a, c, g or t
  modified_base (2853965)..(2853971): a, c, g or t
  modified_base (2853974)..(2853974): a, c, g or t
  modified_base (2854621)..(2854621): a, c, g or t
  modified_base (2857271)..(2857271): a, c, g or t
  modified_base (2857294)..(2857294): a, c, g or t
  modified_base (2857553)..(2857553): a, c, g or t
  modified_base (2859305)..(2859305): a, c, g or t
  modified_base (2859310)..(2859310): a, c, g or t
  modified_base (2859312)..(2859312): a, c, g or t
  modified_base (2859328)..(2859336): a, c, g or t
  modified_base (2859576)..(2859576): a, c, g or t
  modified_base (2859578)..(2859579): a, c, g or t
  modified_base (2860422)..(2860422): a, c, g or t
  modified_base (2861302)..(2861302): a, c, g or t
  modified_base (2863773)..(2863776): a, c, g or t
  modified_base (2864868)..(2864868): a, c, g or t
  modified_base (2866097)..(2866106): a, c, g or t
  modified_base (2866888)..(2866889): a, c, g or t
  modified_base (2866891)..(2866894): a, c, g or t
  modified_base (2867399)..(2867400): a, c, g or t
  modified_base (2867541)..(2867544): a, c, g or t
  modified_base (2867640)..(2867640): a, c, g or t
  modified_base (2867897)..(2867897): a, c, g or t
  modified_base (2869084)..(2869084): a, c, g or t
  modified_base (2869515)..(2869515): a, c, g or t
  modified_base (2869557)..(2869557): a, c, g or t
  modified_base (2869559)..(2869562): a, c, g or t
  modified_base (2870943)..(2870949): a, c, g or t
  modified_base (2871053)..(2871053): a, c, g or t
  modified_base (2873884)..(2873884): a, c, g or t
  modified_base (2873893)..(2873893): a, c, g or t
  modified_base (2873901)..(2873901): a, c, g or t
  modified_base (2874892)..(2874892): a, c, g or t
  modified_base (2876699)..(2876699): a, c, g or t
  modified_base (2876935)..(2876935): a, c, g or t
  modified_base (2878240)..(2878240): a, c, g or t
  modified_base (2880484)..(2880487): a, c, g or t
  modified_base (2880731)..(2880733): a, c, g or t
  modified_base (2883312)..(2883312): a, c, g or t
  modified_base (2883988)..(2883988): a, c, g or t
  modified_base (2887118)..(2887118): a, c, g or t
  modified_base (2887120)..(2887120): a, c, g or t
  modified_base (2889782)..(2889782): a, c, g or t
  modified_base (2890479)..(2890479): a, c, g or t
  modified_base (2892610)..(2892616): a, c, g or t
  modified_base (2893435)..(2893435): a, c, g or t
  modified_base (2893589)..(2893589): a, c, g or t
  modified_base (2894266)..(2894266): a, c, g or t
  modified_base (2896564)..(2896564): a, c, g or t
  modified_base (2896828)..(2896829): a, c, g or t
  modified_base (2896922)..(2896955): a, c, g or t
  modified_base (2897076)..(2897077): a, c, g or t
  modified_base (2900124)..(2900124): a, c, g or t
  modified_base (2900958)..(2900958): a, c, g or t
  modified_base (2901057)..(2901057): a, c, g or t
  modified_base (2901059)..(2901059): a, c, g or t
  modified_base (2901061)..(2901061): a, c, g or t
  modified_base (2901063)..(2901063): a, c, g or t
  modified_base (2902092)..(2902092): a, c, g or t
  modified_base (2902176)..(2902176): a, c, g or t
  modified_base (2902277)..(2902277): a, c, g or t
  modified_base (2902698)..(2902698): a, c, g or t
  modified_base (2903115)..(2903115): a, c, g or t
  modified_base (2906012)..(2906012): a, c, g or t
  modified_base (2906186)..(2906186): a, c, g or t
  modified_base (2908061)..(2908061): a, c, g or t
  modified_base (2908064)..(2908065): a, c, g or t
  modified_base (2908172)..(2908176): a, c, g or t
  modified_base (2908599)..(2908599): a, c, g or t
  modified_base (2909763)..(2909763): a, c, g or t
  modified_base (2911931)..(2911931): a, c, g or t
  modified_base (2912534)..(2912534): a, c, g or t
  modified_base (2913325)..(2913325): a, c, g or t
  modified_base (2916701)..(2916701): a, c, g or t
  modified_base (2917943)..(2917950): a, c, g or t
  modified_base (2920731)..(2920731): a, c, g or t
  modified_base (2922942)..(2922942): a, c, g or t
  modified_base (2923759)..(2923762): a, c, g or t
  modified_base (2924303)..(2924303): a, c, g or t
  modified_base (2927446)..(2927446): a, c, g or t
  modified_base (2927452)..(2927452): a, c, g or t
  modified_base (2929577)..(2929580): a, c, g or t
  modified_base (2931376)..(2931376): a, c, g or t
  modified_base (2931384)..(2931387): a, c, g or t
  modified_base (2931697)..(2931697): a, c, g or t
  modified_base (2934773)..(2934776): a, c, g or t
  modified_base (2934778)..(2934783): a, c, g or t
  modified_base (2936438)..(2936447): a, c, g or t
  modified_base (2936481)..(2936494): a, c, g or t
  modified_base (2938390)..(2938390): a, c, g or t
  modified_base (2940912)..(2940913): a, c, g or t
  modified_base (2941122)..(2941122): a, c, g or t
  modified_base (2941278)..(2941278): a, c, g or t
  modified_base (2941280)..(2941280): a, c, g or t
  modified_base (2943148)..(2943150): a, c, g or t
  modified_base (2943407)..(2943407): a, c, g or t
  modified_base (2943467)..(2943467): a, c, g or t
  modified_base (2947421)..(2947421): a, c, g or t
  modified_base (2949192)..(2949197): a, c, g or t
  modified_base (2950518)..(2950518): a, c, g or t
  modified_base (2951824)..(2951826): a, c, g or t
  modified_base (2951828)..(2951830): a, c, g or t
  modified_base (2952784)..(2952784): a, c, g or t
  modified_base (2954892)..(2954892): a, c, g or t
  modified_base (2955921)..(2955926): a, c, g or t
  modified_base (2956019)..(2956019): a, c, g or t
  modified_base (2956217)..(2956217): a, c, g or t
  modified_base (2957560)..(2957560): a, c, g or t
  modified_base (2957562)..(2957562): a, c, g or t
  modified_base (2958589)..(2958589): a, c, g or t
  modified_base (2961322)..(2961322): a, c, g or t
  modified_base (2961425)..(2961425): a, c, g or t
  modified_base (2962535)..(2962535): a, c, g or t
  modified_base (2963131)..(2963131): a, c, g or t
  modified_base (2965538)..(2965538): a, c, g or t
  modified_base (2965586)..(2965586): a, c, g or t
  modified_base (2965591)..(2965591): a, c, g or t
  modified_base (2966850)..(2966850): a, c, g or t
  modified_base (2966861)..(2966861): a, c, g or t
  modified_base (2967358)..(2967366): a, c, g or t
  modified_base (2967550)..(2967553): a, c, g or t
  modified_base (2969786)..(2969786): a, c, g or t
  modified_base (2970400)..(2970400): a, c, g or t
  modified_base (2971631)..(2971631): a, c, g or t
  modified_base (2971787)..(2971787): a, c, g or t
  modified_base (2973985)..(2973988): a, c, g or t
  modified_base (2974759)..(2974759): a, c, g or t
  modified_base (2976955)..(2976961): a, c, g or t
  modified_base (2977322)..(2977322): a, c, g or t
  modified_base (2977324)..(2977331): a, c, g or t
  modified_base (2978393)..(2978393): a, c, g or t
  modified_base (2978739)..(2978739): a, c, g or t
  modified_base (2979728)..(2979728): a, c, g or t
  modified_base (2981696)..(2981697): a, c, g or t
  modified_base (2982235)..(2982235): a, c, g or t
  modified_base (2983665)..(2983672): a, c, g or t
  modified_base (2984361)..(2984361): a, c, g or t
  modified_base (2985182)..(2985182): a, c, g or t
  modified_base (2985227)..(2985227): a, c, g or t
  modified_base (2985606)..(2985606): a, c, g or t
  modified_base (2986011)..(2986011): a, c, g or t
  modified_base (2987928)..(2987929): a, c, g or t
  modified_base (2988493)..(2988493): a, c, g or t
  modified_base (2989000)..(2989000): a, c, g or t
  modified_base (2993134)..(2993144): a, c, g or t
  modified_base (2993150)..(2993151): a, c, g or t
  modified_base (2995005)..(2995005): a, c, g or t
  modified_base (2995525)..(2995525): a, c, g or t
  modified_base (2995604)..(2995609): a, c, g or t
  modified_base (2995729)..(2995729): a, c, g or t
  modified_base (2995738)..(2995738): a, c, g or t
  modified_base (2997560)..(2997561): a, c, g or t
  modified_base (2997665)..(2997665): a, c, g or t
  modified_base (2997950)..(2997950): a, c, g or t
  modified_base (2997970)..(2997970): a, c, g or t
  modified_base (2998018)..(2998018): a, c, g or t
  modified_base (2999073)..(2999073): a, c, g or t
  modified_base (2999197)..(2999197): a, c, g or t
  modified_base (3002588)..(3002588): a, c, g or t
  modified_base (3004605)..(3004607): a, c, g or t
  modified_base (3004611)..(3004611): a, c, g or t
  modified_base (3005789)..(3005789): a, c, g or t
  modified_base (3005840)..(3005840): a, c, g or t
  modified_base (3006974)..(3006974): a, c, g or t
  modified_base (3006980)..(3006980): a, c, g or t
  modified_base (3006982)..(3006982): a, c, g or t
  modified_base (3008426)..(3008426): a, c, g or t
  modified_base (3010351)..(3010351): a, c, g or t
  modified_base (3012303)..(3012303): a, c, g or t
  modified_base (3012625)..(3012625): a, c, g or t
  modified_base (3013576)..(3013576): a, c, g or t
  modified_base (3013758)..(3013758): a, c, g or t
  modified_base (3013760)..(3013760): a, c, g or t
  modified_base (3013832)..(3013832): a, c, g or t
  modified_base (3014341)..(3014341): a, c, g or t
  modified_base (3015176)..(3015176): a, c, g or t
  modified_base (3019425)..(3019428): a, c, g or t
  modified_base (3021281)..(3021281): a, c, g or t
  modified_base (3021656)..(3021656): a, c, g or t
  modified_base (3024296)..(3024296): a, c, g or t
  modified_base (3026236)..(3026236): a, c, g or t
  modified_base (3026381)..(3026382): a, c, g or t
  modified_base (3026384)..(3026386): a, c, g or t
  modified_base (3026931)..(3026931): a, c, g or t
  modified_base (3026951)..(3026951): a, c, g or t
  modified_base (3027001)..(3027001): a, c, g or t
  modified_base (3028080)..(3028085): a, c, g or t
  modified_base (3028278)..(3028278): a, c, g or t
  modified_base (3032344)..(3032347): a, c, g or t
  modified_base (3034396)..(3034396): a, c, g or t
  modified_base (3035165)..(3035165): a, c, g or t
  modified_base (3035787)..(3035787): a, c, g or t
  modified_base (3038571)..(3038571): a, c, g or t
  modified_base (3046629)..(3046629): a, c, g or t
  modified_base (3046848)..(3046848): a, c, g or t
  modified_base (3046874)..(3046874): a, c, g or t
  modified_base (3046914)..(3046914): a, c, g or t
  modified_base (3049911)..(3049911): a, c, g or t
  modified_base (3049949)..(3049949): a, c, g or t
  modified_base (3054948)..(3054948): a, c, g or t
  modified_base (3059621)..(3059621): a, c, g or t
  modified_base (3062696)..(3062696): a, c, g or t
  modified_base (3068401)..(3068401): a, c, g or t
  modified_base (3069135)..(3069138): a, c, g or t
  modified_base (3069363)..(3069367): a, c, g or t
  modified_base (3069384)..(3069384): a, c, g or t
  modified_base (3070974)..(3070974): a, c, g or t
  modified_base (3071583)..(3071583): a, c, g or t
  modified_base (3077370)..(3077370): a, c, g or t
  modified_base (3078727)..(3078727): a, c, g or t
  modified_base (3080892)..(3080892): a, c, g or t
  modified_base (3081045)..(3081045): a, c, g or t
  modified_base (3081501)..(3081506): a, c, g or t
  modified_base (3083793)..(3083793): a, c, g or t
  modified_base (3083865)..(3083865): a, c, g or t
  modified_base (3084249)..(3084249): a, c, g or t
  modified_base (3085386)..(3085389): a, c, g or t
  modified_base (3085420)..(3085420): a, c, g or t
  modified_base (3085576)..(3085576): a, c, g or t
  modified_base (3085616)..(3085621): a, c, g or t
  modified_base (3091741)..(3091744): a, c, g or t
  modified_base (3091747)..(3091748): a, c, g or t
  modified_base (3091750)..(3091759): a, c, g or t
  modified_base (3092138)..(3092138): a, c, g or t
  modified_base (3092185)..(3092185): a, c, g or t
  modified_base (3092203)..(3092203): a, c, g or t
  modified_base (3092207)..(3092207): a, c, g or t
  modified_base (3095006)..(3095009): a, c, g or t
  modified_base (3095343)..(3095348): a, c, g or t
  modified_base (3095464)..(3095464): a, c, g or t
  modified_base (3095473)..(3095473): a, c, g or t
  modified_base (3096046)..(3096046): a, c, g or t
  modified_base (3096132)..(3096178): a, c, g or t
  modified_base (3096184)..(3096184): a, c, g or t
  modified_base (3096351)..(3096351): a, c, g or t
  modified_base (3096392)..(3096393): a, c, g or t
  modified_base (3096397)..(3096436): a, c, g or t
  modified_base (3096590)..(3096629): a, c, g or t
  modified_base (3096693)..(3096697): a, c, g or t
  modified_base (3096701)..(3096701): a, c, g or t
  modified_base (3096710)..(3096710): a, c, g or t
  modified_base (3096766)..(3096771): a, c, g or t
  modified_base (3096773)..(3096774): a, c, g or t
  modified_base (3096798)..(3096799): a, c, g or t
  modified_base (3096822)..(3096822): a, c, g or t
  modified_base (3096847)..(3096856): a, c, g or t
  modified_base (3096955)..(3096956): a, c, g or t
  modified_base (3096982)..(3096983): a, c, g or t
  modified_base (3097095)..(3097096): a, c, g or t
  modified_base (3097227)..(3097227): a, c, g or t
  modified_base (3097335)..(3097335): a, c, g or t
  modified_base (3097625)..(3097626): a, c, g or t
  modified_base (3097628)..(3097631): a, c, g or t
  modified_base (3097638)..(3097640): a, c, g or t
  modified_base (3097642)..(3097649): a, c, g or t
  modified_base (3097784)..(3097798): a, c, g or t
  modified_base (3097883)..(3097887): a, c, g or t
  modified_base (3097951)..(3097954): a, c, g or t
  modified_base (3098057)..(3098061): a, c, g or t
  modified_base (3098190)..(3098192): a, c, g or t
  modified_base (3098255)..(3098255): a, c, g or t
  modified_base (3098562)..(3098562): a, c, g or t
  modified_base (3098671)..(3098675): a, c, g or t
  modified_base (3099523)..(3099523): a, c, g or t
  modified_base (3103164)..(3103164): a, c, g or t
  modified_base (3103629)..(3103629): a, c, g or t
  modified_base (3104044)..(3104047): a, c, g or t
  modified_base (3105211)..(3105212): a, c, g or t
  modified_base (3105216)..(3105219): a, c, g or t
  modified_base (3105285)..(3105288): a, c, g or t
  modified_base (3105321)..(3105321): a, c, g or t
  modified_base (3105602)..(3105602): a, c, g or t
  modified_base (3105648)..(3105651): a, c, g or t
  modified_base (3105663)..(3105663): a, c, g or t
  modified_base (3105696)..(3105696): a, c, g or t
  modified_base (3105960)..(3105960): a, c, g or t
  modified_base (3106729)..(3106729): a, c, g or t
  modified_base (3110993)..(3110993): a, c, g or t
  modified_base (3112677)..(3112681): a, c, g or t
  modified_base (3116993)..(3116993): a, c, g or t
  modified_base (3120400)..(3120403): a, c, g or t
  modified_base (3120772)..(3120775): a, c, g or t
  modified_base (3122166)..(3122181): a, c, g or t
  modified_base (3122662)..(3122662): a, c, g or t
  modified_base (3123344)..(3123392): a, c, g or t
  modified_base (3123420)..(3123420): a, c, g or t
  modified_base (3123425)..(3123485): a, c, g or t
  modified_base (3123496)..(3123497): a, c, g or t
  modified_base (3123523)..(3123568): a, c, g or t
  modified_base (3123573)..(3123573): a, c, g or t
  modified_base (3123577)..(3123578): a, c, g or t
  modified_base (3123590)..(3123596): a, c, g or t
  modified_base (3123634)..(3123636): a, c, g or t
  modified_base (3123639)..(3123640): a, c, g or t
  modified_base (3123642)..(3123643): a, c, g or t
  modified_base (3123667)..(3123680): a, c, g or t
  modified_base (3123704)..(3123756): a, c, g or t
  modified_base (3123767)..(3123768): a, c, g or t
  modified_base (3123780)..(3123802): a, c, g or t
  modified_base (3123813)..(3123814): a, c, g or t
  modified_base (3123818)..(3123820): a, c, g or t
  modified_base (3123826)..(3123858): a, c, g or t
  modified_base (3123864)..(3123865): a, c, g or t
  modified_base (3123905)..(3123921): a, c, g or t
  modified_base (3123963)..(3123964): a, c, g or t
  modified_base (3123968)..(3124044): a, c, g or t
  modified_base (3124057)..(3124058): a, c, g or t
  modified_base (3124133)..(3124134): a, c, g or t
  modified_base (3124139)..(3124939): a, c, g or t
  modified_base (3124942)..(3124945): a, c, g or t
  modified_base (3124947)..(3124948): a, c, g or t
  modified_base (3124960)..(3125183): a, c, g or t
  modified_base (3125205)..(3125206): a, c, g or t
  modified_base (3125211)..(3125469): a, c, g or t
  modified_base (3125479)..(3125480): a, c, g or t
  modified_base (3125490)..(3125529): a, c, g or t
  modified_base (3125551)..(3125556): a, c, g or t
  modified_base (3125590)..(3125814): a, c, g or t
  modified_base (3125914)..(3125955): a, c, g or t
  modified_base (3126085)..(3126085): a, c, g or t
  modified_base (3126115)..(3126154): a, c, g or t
  modified_base (3126196)..(3126202): a, c, g or t
  modified_base (3126229)..(3126232): a, c, g or t
  modified_base (3126237)..(3126295): a, c, g or t
  modified_base (3126302)..(3126302): a, c, g or t
  modified_base (3126305)..(3126305): a, c, g or t
  modified_base (3126332)..(3126332): a, c, g or t
  modified_base (3126334)..(3126339): a, c, g or t
  modified_base (3126341)..(3126341): a, c, g or t
  modified_base (3126346)..(3126346): a, c, g or t
  modified_base (3126362)..(3126421): a, c, g or t
  modified_base (3126425)..(3126425): a, c, g or t
  modified_base (3126439)..(3126440): a, c, g or t
  modified_base (3126444)..(3127232): a, c, g or t
  modified_base (3127235)..(3127235): a, c, g or t
  modified_base (3127238)..(3127238): a, c, g or t
  modified_base (3127267)..(3127488): a, c, g or t
  modified_base (3127490)..(3127491): a, c, g or t
  modified_base (3127515)..(3127515): a, c, g or t
  modified_base (3127517)..(3127639): a, c, g or t
  modified_base (3127647)..(3127647): a, c, g or t
  modified_base (3127659)..(3127662): a, c, g or t
  modified_base (3127684)..(3127700): a, c, g or t
  modified_base (3127731)..(3127731): a, c, g or t
  modified_base (3127744)..(3127745): a, c, g or t
  modified_base (3127747)..(3127761): a, c, g or t
  modified_base (3127861)..(3127886): a, c, g or t
  modified_base (3127902)..(3127903): a, c, g or t
  modified_base (3127908)..(3127933): a, c, g or t
  modified_base (3127990)..(3128022): a, c, g or t
  modified_base (3128025)..(3128026): a, c, g or t
  modified_base (3128029)..(3128030): a, c, g or t
  modified_base (3128121)..(3128128): a, c, g or t
  modified_base (3128232)..(3128233): a, c, g or t
  modified_base (3128235)..(3128236): a, c, g or t
  modified_base (3128238)..(3128239): a, c, g or t
  modified_base (3128275)..(3128276): a, c, g or t
  modified_base (3128306)..(3128307): a, c, g or t
  modified_base (3128311)..(3128312): a, c, g or t
  modified_base (3128385)..(3128400): a, c, g or t
  modified_base (3128428)..(3128429): a, c, g or t
  modified_base (3128440)..(3128441): a, c, g or t
  modified_base (3128467)..(3128476): a, c, g or t
  modified_base (3128527)..(3128530): a, c, g or t
  modified_base (3128532)..(3128533): a, c, g or t
  modified_base (3128535)..(3128536): a, c, g or t
  modified_base (3128682)..(3128719): a, c, g or t
  modified_base (3128740)..(3128741): a, c, g or t
  modified_base (3128757)..(3128758): a, c, g or t
  modified_base (3128767)..(3128768): a, c, g or t
  modified_base (3128772)..(3128773): a, c, g or t
  modified_base (3128800)..(3128801): a, c, g or t
  modified_base (3128841)..(3128859): a, c, g or t
  modified_base (3128935)..(3128940): a, c, g or t
  modified_base (3128970)..(3128986): a, c, g or t
  modified_base (3129040)..(3129054): a, c, g or t
  modified_base (3129120)..(3129176): a, c, g or t
  modified_base (3129205)..(3129206): a, c, g or t
  modified_base (3129234)..(3129242): a, c, g or t
  modified_base (3129255)..(3129256): a, c, g or t
  modified_base (3129262)..(3129263): a, c, g or t
  modified_base (3129265)..(3129294): a, c, g or t
  modified_base (3129323)..(3129328): a, c, g or t
  modified_base (3129353)..(3129434): a, c, g or t
  modified_base (3129457)..(3129615): a, c, g or t
  modified_base (3129639)..(3129641): a, c, g or t
  modified_base (3129702)..(3129720): a, c, g or t
  modified_base (3129748)..(3129748): a, c, g or t
  modified_base (3129763)..(3129766): a, c, g or t
  modified_base (3129773)..(3129774): a, c, g or t
  modified_base (3129776)..(3129776): a, c, g or t
  modified_base (3129787)..(3129787): a, c, g or t
  modified_base (3129790)..(3129803): a, c, g or t
  modified_base (3129885)..(3129888): a, c, g or t
  modified_base (3129895)..(3129895): a, c, g or t
  modified_base (3129924)..(3129924): a, c, g or t
  modified_base (3129943)..(3129944): a, c, g or t
  modified_base (3129968)..(3129971): a, c, g or t
  modified_base (3129974)..(3129978): a, c, g or t
  modified_base (3129980)..(3129980): a, c, g or t
  modified_base (3130014)..(3130015): a, c, g or t
  modified_base (3130017)..(3130068): a, c, g or t
  modified_base (3130092)..(3130135): a, c, g or t
  modified_base (3130138)..(3130139): a, c, g or t
  modified_base (3130185)..(3130185): a, c, g or t
  modified_base (3130190)..(3130239): a, c, g or t
  modified_base (3130427)..(3130438): a, c, g or t
  modified_base (3130482)..(3130482): a, c, g or t
  modified_base (3130588)..(3130589): a, c, g or t
  modified_base (3130673)..(3130681): a, c, g or t
  modified_base (3130694)..(3130695): a, c, g or t
  modified_base (3130781)..(3130783): a, c, g or t
  modified_base (3130786)..(3130848): a, c, g or t
  modified_base (3131004)..(3131005): a, c, g or t
  modified_base (3131044)..(3131044): a, c, g or t
  modified_base (3131046)..(3131050): a, c, g or t
  modified_base (3131400)..(3131403): a, c, g or t
  modified_base (3131522)..(3131525): a, c, g or t
  modified_base (3131582)..(3131583): a, c, g or t
  modified_base (3131586)..(3131596): a, c, g or t
  modified_base (3131690)..(3131690): a, c, g or t
  modified_base (3131878)..(3131878): a, c, g or t
  modified_base (3131955)..(3131958): a, c, g or t
  modified_base (3131994)..(3132004): a, c, g or t
  modified_base (3132132)..(3132136): a, c, g or t
  modified_base (3132176)..(3132181): a, c, g or t
  modified_base (3132220)..(3132226): a, c, g or t
  modified_base (3132731)..(3132738): a, c, g or t
  modified_base (3133275)..(3133282): a, c, g or t
  modified_base (3133420)..(3133420): a, c, g or t
  modified_base (3133605)..(3133605): a, c, g or t
  modified_base (3133644)..(3133644): a, c, g or t
  modified_base (3133693)..(3133693): a, c, g or t
  modified_base (3133708)..(3133708): a, c, g or t
  modified_base (3134804)..(3134804): a, c, g or t
  modified_base (3136276)..(3136276): a, c, g or t
  modified_base (3136311)..(3136314): a, c, g or t
  modified_base (3137462)..(3137470): a, c, g or t
  modified_base (3140021)..(3140021): a, c, g or t
  modified_base (3140612)..(3140612): a, c, g or t
  modified_base (3140911)..(3140911): a, c, g or t
  modified_base (3140955)..(3140955): a, c, g or t
  modified_base (3141343)..(3141343): a, c, g or t
  modified_base (3141490)..(3141490): a, c, g or t
  modified_base (3142177)..(3142177): a, c, g or t
  modified_base (3142792)..(3142792): a, c, g or t
  modified_base (3143778)..(3143778): a, c, g or t
  modified_base (3144401)..(3144401): a, c, g or t
  modified_base (3146668)..(3146668): a, c, g or t
  modified_base (3146672)..(3146672): a, c, g or t
  modified_base (3147186)..(3147186): a, c, g or t
  modified_base (3147272)..(3147275): a, c, g or t
  modified_base (3148011)..(3148011): a, c, g or t
  modified_base (3148042)..(3148045): a, c, g or t
  modified_base (3149617)..(3149620): a, c, g or t
  modified_base (3149857)..(3149857): a, c, g or t
  modified_base (3150499)..(3150499): a, c, g or t
  modified_base (3150501)..(3150501): a, c, g or t
  modified_base (3150585)..(3150585): a, c, g or t
  modified_base (3150745)..(3150748): a, c, g or t
  modified_base (3151148)..(3151148): a, c, g or t
  modified_base (3151721)..(3151721): a, c, g or t
  modified_base (3151759)..(3151759): a, c, g or t
  modified_base (3151963)..(3151963): a, c, g or t
  modified_base (3153635)..(3153635): a, c, g or t
  modified_base (3153854)..(3153854): a, c, g or t
  modified_base (3153880)..(3153880): a, c, g or t
  modified_base (3154571)..(3154571): a, c, g or t
  modified_base (3155491)..(3155499): a, c, g or t
  modified_base (3156120)..(3156120): a, c, g or t
  modified_base (3156395)..(3156395): a, c, g or t
  modified_base (3157372)..(3157372): a, c, g or t
  modified_base (3157806)..(3157806): a, c, g or t
  modified_base (3157823)..(3157823): a, c, g or t
  modified_base (3157946)..(3157955): a, c, g or t
  modified_base (3158186)..(3158204): a, c, g or t
  modified_base (3160734)..(3160734): a, c, g or t
  modified_base (3161171)..(3161171): a, c, g or t
  modified_base (3161713)..(3161713): a, c, g or t
  modified_base (3161741)..(3161741): a, c, g or t
  modified_base (3162556)..(3162556): a, c, g or t
  modified_base (3162684)..(3162684): a, c, g or t
  modified_base (3164122)..(3164123): a, c, g or t
  modified_base (3169058)..(3169058): a, c, g or t
  modified_base (3170266)..(3170266): a, c, g or t
  modified_base (3170355)..(3170355): a, c, g or t
  modified_base (3170444)..(3170444): a, c, g or t
  modified_base (3170459)..(3170459): a, c, g or t
  modified_base (3170523)..(3170523): a, c, g or t
  modified_base (3172076)..(3172076): a, c, g or t
  modified_base (3173435)..(3173435): a, c, g or t
  modified_base (3173713)..(3173713): a, c, g or t
  modified_base (3173938)..(3173938): a, c, g or t
  modified_base (3176152)..(3176155): a, c, g or t
  modified_base (3176162)..(3176166): a, c, g or t
  modified_base (3176360)..(3176360): a, c, g or t
  modified_base (3176714)..(3176714): a, c, g or t
  modified_base (3177263)..(3177266): a, c, g or t
  modified_base (3177837)..(3177838): a, c, g or t
  modified_base (3177933)..(3177933): a, c, g or t
  modified_base (3178230)..(3178230): a, c, g or t
  modified_base (3181055)..(3181058): a, c, g or t
  modified_base (3181060)..(3181061): a, c, g or t
  modified_base (3181063)..(3181084): a, c, g or t
  modified_base (3181087)..(3181088): a, c, g or t
  modified_base (3181191)..(3181192): a, c, g or t
  modified_base (3181196)..(3181197): a, c, g or t
  modified_base (3181199)..(3181244): a, c, g or t
  modified_base (3181331)..(3181350): a, c, g or t
  modified_base (3181353)..(3181354): a, c, g or t
  modified_base (3185012)..(3185015): a, c, g or t
  modified_base (3185918)..(3185918): a, c, g or t
  modified_base (3186148)..(3186148): a, c, g or t
  modified_base (3186542)..(3186542): a, c, g or t
  modified_base (3187237)..(3187237): a, c, g or t
  modified_base (3188064)..(3188070): a, c, g or t
  modified_base (3188072)..(3188073): a, c, g or t
  modified_base (3188577)..(3188578): a, c, g or t
  modified_base (3188580)..(3188583): a, c, g or t
  modified_base (3188587)..(3188588): a, c, g or t
  modified_base (3188590)..(3188591): a, c, g or t
  modified_base (3190094)..(3190094): a, c, g or t
  modified_base (3190102)..(3190102): a, c, g or t
  modified_base (3190149)..(3190152): a, c, g or t
  modified_base (3192012)..(3192015): a, c, g or t
  modified_base (3192537)..(3192537): a, c, g or t
  modified_base (3192677)..(3192677): a, c, g or t
  modified_base (3193331)..(3193331): a, c, g or t
  modified_base (3197303)..(3197304): a, c, g or t
  modified_base (3198346)..(3198346): a, c, g or t
  modified_base (3198419)..(3198419): a, c, g or t
  modified_base (3199474)..(3199474): a, c, g or t
  modified_base (3200339)..(3200339): a, c, g or t
  modified_base (3200832)..(3200836): a, c, g or t
  modified_base (3201191)..(3201195): a, c, g or t
  modified_base (3201197)..(3201198): a, c, g or t
  modified_base (3201535)..(3201538): a, c, g or t
  modified_base (3202178)..(3202178): a, c, g or t
  modified_base (3205767)..(3205767): a, c, g or t
  modified_base (3205921)..(3205921): a, c, g or t
  modified_base (3207240)..(3207240): a, c, g or t
  modified_base (3207653)..(3207656): a, c, g or t
  modified_base (3208929)..(3208929): a, c, g or t
  modified_base (3209063)..(3209063): a, c, g or t
  modified_base (3209277)..(3209277): a, c, g or t
  modified_base (3210109)..(3210109): a, c, g or t
  modified_base (3210821)..(3210821): a, c, g or t
  modified_base (3211333)..(3211333): a, c, g or t
  modified_base (3213107)..(3213110): a, c, g or t
  modified_base (3213417)..(3213420): a, c, g or t
  modified_base (3213904)..(3213913): a, c, g or t
  modified_base (3214199)..(3214199): a, c, g or t
  modified_base (3214942)..(3214942): a, c, g or t
  modified_base (3216568)..(3216568): a, c, g or t
  modified_base (3217289)..(3217289): a, c, g or t
  modified_base (3218604)..(3218607): a, c, g or t
  modified_base (3218690)..(3218690): a, c, g or t
  modified_base (3220396)..(3220398): a, c, g or t
  modified_base (3220400)..(3220400): a, c, g or t
  modified_base (3221001)..(3221001): a, c, g or t
  modified_base (3221571)..(3221571): a, c, g or t
  modified_base (3221641)..(3221641): a, c, g or t
  modified_base (3222061)..(3222064): a, c, g or t
  modified_base (3225297)..(3225297): a, c, g or t
  modified_base (3226050)..(3226050): a, c, g or t
  modified_base (3226608)..(3226608): a, c, g or t
  modified_base (3226638)..(3226638): a, c, g or t
  modified_base (3227308)..(3227308): a, c, g or t
  modified_base (3233468)..(3233471): a, c, g or t
  modified_base (3235375)..(3235375): a, c, g or t
  modified_base (3236104)..(3236104): a, c, g or t
  modified_base (3240723)..(3240723): a, c, g or t
  modified_base (3240735)..(3240735): a, c, g or t
  modified_base (3240858)..(3240858): a, c, g or t
  modified_base (3241741)..(3241741): a, c, g or t
  modified_base (3242696)..(3242696): a, c, g or t
  modified_base (3246133)..(3246134): a, c, g or t
  modified_base (3246136)..(3246141): a, c, g or t
  modified_base (3248166)..(3248168): a, c, g or t
  modified_base (3249290)..(3249290): a, c, g or t
  modified_base (3249529)..(3249531): a, c, g or t
  modified_base (3250789)..(3250792): a, c, g or t
  modified_base (3252665)..(3252665): a, c, g or t
  modified_base (3253249)..(3253249): a, c, g or t
  modified_base (3260448)..(3260448): a, c, g or t
  modified_base (3260741)..(3260741): a, c, g or t
  modified_base (3262189)..(3262189): a, c, g or t
  modified_base (3262832)..(3262833): a, c, g or t
  modified_base (3263272)..(3263272): a, c, g or t
  modified_base (3263936)..(3263936): a, c, g or t
  modified_base (3264571)..(3264571): a, c, g or t
  modified_base (3267053)..(3267055): a, c, g or t
  modified_base (3267958)..(3267958): a, c, g or t
  modified_base (3268838)..(3268838): a, c, g or t
  modified_base (3268840)..(3268840): a, c, g or t
  modified_base (3271173)..(3271185): a, c, g or t
  modified_base (3271642)..(3271643): a, c, g or t
  modified_base (3271730)..(3271730): a, c, g or t
  modified_base (3277243)..(3277249): a, c, g or t
  modified_base (3277402)..(3277405): a, c, g or t
  modified_base (3278300)..(3278300): a, c, g or t
  modified_base (3279934)..(3279934): a, c, g or t
  modified_base (3281771)..(3281771): a, c, g or t
  modified_base (3284170)..(3284170): a, c, g or t
  modified_base (3285950)..(3285953): a, c, g or t
  modified_base (3287213)..(3287213): a, c, g or t
  modified_base (3289368)..(3289368): a, c, g or t
  modified_base (3290692)..(3290695): a, c, g or t
  modified_base (3293143)..(3293143): a, c, g or t
  modified_base (3293215)..(3293215): a, c, g or t
  modified_base (3293432)..(3293436): a, c, g or t
  modified_base (3293771)..(3293771): a, c, g or t
  modified_base (3295887)..(3295887): a, c, g or t
  modified_base (3296035)..(3296035): a, c, g or t
  modified_base (3298418)..(3298418): a, c, g or t
  modified_base (3300929)..(3300935): a, c, g or t
  modified_base (3302035)..(3302035): a, c, g or t
  modified_base (3302503)..(3302503): a, c, g or t
  modified_base (3304282)..(3304282): a, c, g or t
  modified_base (3304427)..(3304434): a, c, g or t
  modified_base (3305394)..(3305394): a, c, g or t
  modified_base (3305515)..(3305515): a, c, g or t
  modified_base (3308746)..(3308763): a, c, g or t
  modified_base (3308827)..(3308884): a, c, g or t
  modified_base (3308904)..(3308905): a, c, g or t
  modified_base (3308956)..(3308957): a, c, g or t
  modified_base (3309745)..(3309745): a, c, g or t
  modified_base (3310031)..(3310031): a, c, g or t
  modified_base (3310143)..(3310143): a, c, g or t
  modified_base (3310294)..(3310294): a, c, g or t
  modified_base (3310973)..(3310974): a, c, g or t
  modified_base (3310976)..(3310978): a, c, g or t
  modified_base (3311977)..(3311977): a, c, g or t
  modified_base (3312004)..(3312004): a, c, g or t
  modified_base (3314489)..(3314492): a, c, g or t
  modified_base (3317264)..(3317264): a, c, g or t
  modified_base (3319849)..(3319849): a, c, g or t
  modified_base (3322927)..(3322930): a, c, g or t
  modified_base (3323915)..(3323918): a, c, g or t
  modified_base (3325685)..(3325685): a, c, g or t
  modified_base (3330324)..(3330324): a, c, g or t
  modified_base (3331812)..(3331812): a, c, g or t
  modified_base (3332073)..(3332073): a, c, g or t
  modified_base (3332849)..(3332849): a, c, g or t
  modified_base (3333716)..(3333720): a, c, g or t
  modified_base (3334535)..(3334535): a, c, g or t
  modified_base (3335688)..(3335688): a, c, g or t
  modified_base (3336243)..(3336243): a, c, g or t
  modified_base (3339519)..(3339519): a, c, g or t
  modified_base (3340831)..(3340831): a, c, g or t
  modified_base (3341456)..(3341456): a, c, g or t
  modified_base (3344291)..(3344291): a, c, g or t
  modified_base (3344343)..(3344343): a, c, g or t
  modified_base (3345566)..(3345569): a, c, g or t
  modified_base (3345571)..(3345572): a, c, g or t
  modified_base (3345586)..(3345586): a, c, g or t
  modified_base (3347347)..(3347351): a, c, g or t
  modified_base (3348174)..(3348174): a, c, g or t
  modified_base (3348441)..(3348441): a, c, g or t
  modified_base (3349675)..(3349675): a, c, g or t
  modified_base (3349677)..(3349694): a, c, g or t
  modified_base (3349743)..(3349757): a, c, g or t
  modified_base (3350654)..(3350654): a, c, g or t
  modified_base (3352553)..(3352556): a, c, g or t
  modified_base (3352746)..(3352750): a, c, g or t
  modified_base (3352752)..(3352754): a, c, g or t
  modified_base (3352757)..(3352759): a, c, g or t
  modified_base (3353368)..(3353369): a, c, g or t
  modified_base (3353449)..(3353452): a, c, g or t
  modified_base (3353933)..(3353936): a, c, g or t
  modified_base (3356184)..(3356188): a, c, g or t
  modified_base (3356278)..(3356286): a, c, g or t
  modified_base (3356442)..(3356442): a, c, g or t
  modified_base (3356623)..(3356623): a, c, g or t
  modified_base (3357613)..(3357614): a, c, g or t
  modified_base (3357637)..(3357637): a, c, g or t
  modified_base (3358351)..(3358351): a, c, g or t
  modified_base (3358709)..(3358709): a, c, g or t
  modified_base (3358858)..(3358864): a, c, g or t
  modified_base (3361383)..(3361383): a, c, g or t
  modified_base (3362463)..(3362467): a, c, g or t
  modified_base (3364830)..(3364833): a, c, g or t
  modified_base (3365122)..(3365124): a, c, g or t
  modified_base (3365304)..(3365304): a, c, g or t
  modified_base (3366041)..(3366041): a, c, g or t
  modified_base (3366659)..(3366663): a, c, g or t
  modified_base (3366762)..(3366762): a, c, g or t
  modified_base (3368383)..(3368383): a, c, g or t
  modified_base (3368539)..(3368540): a, c, g or t
  modified_base (3369779)..(3369779): a, c, g or t
  modified_base (3371456)..(3371456): a, c, g or t
  modified_base (3373456)..(3373459): a, c, g or t
  modified_base (3377070)..(3377070): a, c, g or t
  modified_base (3378740)..(3378740): a, c, g or t
  modified_base (3378898)..(3378898): a, c, g or t
  modified_base (3379032)..(3379037): a, c, g or t
  modified_base (3380382)..(3380382): a, c, g or t
  modified_base (3381488)..(3381491): a, c, g or t
  modified_base (3381494)..(3381494): a, c, g or t
  modified_base (3383303)..(3383303): a, c, g or t
  modified_base (3384353)..(3384353): a, c, g or t
  modified_base (3385119)..(3385119): a, c, g or t
  modified_base (3386021)..(3386021): a, c, g or t
  modified_base (3388336)..(3388336): a, c, g or t
  modified_base (3389764)..(3389764): a, c, g or t
  modified_base (3394036)..(3394036): a, c, g or t
  modified_base (3395278)..(3395278): a, c, g or t
  modified_base (3398643)..(3398643): a, c, g or t
  modified_base (3399363)..(3399363): a, c, g or t
  modified_base (3399366)..(3399366): a, c, g or t
  modified_base (3400770)..(3400770): a, c, g or t
  modified_base (3401157)..(3401157): a, c, g or t
  modified_base (3406596)..(3406596): a, c, g or t
  modified_base (3406625)..(3406625): a, c, g or t
  modified_base (3407291)..(3407291): a, c, g or t
  modified_base (3408673)..(3408673): a, c, g or t
  modified_base (3409618)..(3409618): a, c, g or t
  modified_base (3410581)..(3410581): a, c, g or t
  modified_base (3410782)..(3410782): a, c, g or t
  modified_base (3410864)..(3410864): a, c, g or t
  modified_base (3412044)..(3412047): a, c, g or t
  modified_base (3413611)..(3413611): a, c, g or t
  modified_base (3414350)..(3414350): a, c, g or t
  modified_base (3418396)..(3418396): a, c, g or t
  modified_base (3418401)..(3418408): a, c, g or t
  modified_base (3418924)..(3418924): a, c, g or t
  modified_base (3419335)..(3419335): a, c, g or t
  modified_base (3419355)..(3419357): a, c, g or t
  modified_base (3419475)..(3419475): a, c, g or t
  modified_base (3420870)..(3420873): a, c, g or t
  modified_base (3421733)..(3421734): a, c, g or t
  modified_base (3421756)..(3421756): a, c, g or t
  modified_base (3422711)..(3422711): a, c, g or t
  modified_base (3430719)..(3430719): a, c, g or t
  modified_base (3432516)..(3432516): a, c, g or t
  modified_base (3433866)..(3433866): a, c, g or t
  modified_base (3433869)..(3433872): a, c, g or t
  modified_base (3437895)..(3437895): a, c, g or t
  modified_base (3439090)..(3439094): a, c, g or t
  modified_base (3439511)..(3439511): a, c, g or t
  modified_base (3439875)..(3439881): a, c, g or t
  modified_base (3441663)..(3441663): a, c, g or t
  modified_base (3442958)..(3442958): a, c, g or t
  modified_base (3442985)..(3442985): a, c, g or t
  modified_base (3443059)..(3443059): a, c, g or t
  modified_base (3443080)..(3443080): a, c, g or t
  modified_base (3444832)..(3444835): a, c, g or t
  modified_base (3445274)..(3445274): a, c, g or t
  modified_base (3446411)..(3446415): a, c, g or t
  modified_base (3448269)..(3448269): a, c, g or t
  modified_base (3451070)..(3451078): a, c, g or t
  modified_base (3451414)..(3451417): a, c, g or t
  modified_base (3456066)..(3456066): a, c, g or t
  modified_base (3457025)..(3457025): a, c, g or t
  modified_base (3457446)..(3457446): a, c, g or t
  modified_base (3460342)..(3460346): a, c, g or t
  modified_base (3460409)..(3460412): a, c, g or t
  modified_base (3460414)..(3460418): a, c, g or t
  modified_base (3460724)..(3460724): a, c, g or t
  modified_base (3463660)..(3463660): a, c, g or t
  modified_base (3466129)..(3466129): a, c, g or t
  modified_base (3467531)..(3467531): a, c, g or t
  modified_base (3468766)..(3468766): a, c, g or t
  modified_base (3471704)..(3471704): a, c, g or t
  modified_base (3471909)..(3471909): a, c, g or t
  modified_base (3472140)..(3472140): a, c, g or t
  modified_base (3472695)..(3472698): a, c, g or t
  modified_base (3473636)..(3473636): a, c, g or t
  modified_base (3475723)..(3475725): a, c, g or t
  modified_base (3478478)..(3478478): a, c, g or t
  modified_base (3480109)..(3480109): a, c, g or t
  modified_base (3481776)..(3481777): a, c, g or t
  modified_base (3483200)..(3483203): a, c, g or t
  modified_base (3483968)..(3483968): a, c, g or t
  modified_base (3485537)..(3485537): a, c, g or t
  modified_base (3486097)..(3486097): a, c, g or t
  modified_base (3486757)..(3486757): a, c, g or t
  modified_base (3487978)..(3487983): a, c, g or t
  modified_base (3488066)..(3488066): a, c, g or t
  modified_base (3488137)..(3488137): a, c, g or t
  modified_base (3489298)..(3489301): a, c, g or t
  modified_base (3489927)..(3489930): a, c, g or t
  modified_base (3491949)..(3491959): a, c, g or t
  modified_base (3491961)..(3491962): a, c, g or t
  modified_base (3492486)..(3492486): a, c, g or t
  modified_base (3492491)..(3492498): a, c, g or t
  modified_base (3493127)..(3493132): a, c, g or t
  modified_base (3493684)..(3493687): a, c, g or t
  modified_base (3493805)..(3493808): a, c, g or t
  modified_base (3494663)..(3494663): a, c, g or t
  modified_base (3495192)..(3495195): a, c, g or t
  modified_base (3495197)..(3495200): a, c, g or t
  modified_base (3495338)..(3495341): a, c, g or t
  modified_base (3495346)..(3495347): a, c, g or t
  modified_base (3495354)..(3495355): a, c, g or t
  modified_base (3495359)..(3495360): a, c, g or t
  modified_base (3500662)..(3500671): a, c, g or t
  modified_base (3502696)..(3502696): a, c, g or t
  modified_base (3504057)..(3504060): a, c, g or t
  modified_base (3504301)..(3504301): a, c, g or t
  modified_base (3504561)..(3504564): a, c, g or t
  modified_base (3504936)..(3504997): a, c, g or t
  modified_base (3505569)..(3505569): a, c, g or t
  modified_base (3506219)..(3506219): a, c, g or t
  modified_base (3506312)..(3506312): a, c, g or t
  modified_base (3509495)..(3509495): a, c, g or t
  modified_base (3510792)..(3510792): a, c, g or t
  modified_base (3511409)..(3511409): a, c, g or t
  modified_base (3512408)..(3512408): a, c, g or t
  modified_base (3512519)..(3512519): a, c, g or t
  modified_base (3514691)..(3514691): a, c, g or t
  modified_base (3515137)..(3515137): a, c, g or t
  modified_base (3515947)..(3515947): a, c, g or t
  modified_base (3516990)..(3516990): a, c, g or t
  modified_base (3518047)..(3518047): a, c, g or t
  modified_base (3518837)..(3518837): a, c, g or t
  modified_base (3520613)..(3520613): a, c, g or t
  modified_base (3521128)..(3521128): a, c, g or t
  modified_base (3521796)..(3521796): a, c, g or t
  modified_base (3522001)..(3522004): a, c, g or t
  modified_base (3522046)..(3522046): a, c, g or t
  modified_base (3522065)..(3522065): a, c, g or t
  modified_base (3522144)..(3522144): a, c, g or t
  modified_base (3525461)..(3525461): a, c, g or t
  modified_base (3527270)..(3527270): a, c, g or t
  modified_base (3528388)..(3528388): a, c, g or t
  modified_base (3529613)..(3529613): a, c, g or t
  modified_base (3529828)..(3529828): a, c, g or t
  modified_base (3533793)..(3533793): a, c, g or t
  modified_base (3535009)..(3535009): a, c, g or t
  modified_base (3535649)..(3535655): a, c, g or t
  modified_base (3538546)..(3538546): a, c, g or t
  modified_base (3539027)..(3539027): a, c, g or t
  modified_base (3542343)..(3542344): a, c, g or t
  modified_base (3542542)..(3542542): a, c, g or t
  modified_base (3544323)..(3544323): a, c, g or t
  modified_base (3544389)..(3544389): a, c, g or t
  modified_base (3546038)..(3546038): a, c, g or t
  modified_base (3548739)..(3548739): a, c, g or t
  modified_base (3550616)..(3550616): a, c, g or t
  modified_base (3551139)..(3551139): a, c, g or t
  modified_base (3551557)..(3551560): a, c, g or t
  modified_base (3556893)..(3556896): a, c, g or t
  modified_base (3560671)..(3560671): a, c, g or t
  modified_base (3563615)..(3563617): a, c, g or t
  modified_base (3564140)..(3564141): a, c, g or t
  modified_base (3564161)..(3564161): a, c, g or t
  modified_base (3565549)..(3565550): a, c, g or t
  modified_base (3565818)..(3565818): a, c, g or t
  modified_base (3568912)..(3568912): a, c, g or t
  modified_base (3569623)..(3569627): a, c, g or t
  modified_base (3570377)..(3570377): a, c, g or t
  modified_base (3571526)..(3571532): a, c, g or t
  modified_base (3572917)..(3572917): a, c, g or t
  modified_base (3573254)..(3573254): a, c, g or t
  modified_base (3573533)..(3573533): a, c, g or t
  modified_base (3574367)..(3574372): a, c, g or t
  modified_base (3574863)..(3574868): a, c, g or t
  modified_base (3578719)..(3578722): a, c, g or t
  modified_base (3581616)..(3581616): a, c, g or t
  modified_base (3581759)..(3581759): a, c, g or t
  modified_base (3584783)..(3584783): a, c, g or t
  modified_base (3585658)..(3585658): a, c, g or t
  modified_base (3585677)..(3585677): a, c, g or t
  modified_base (3585747)..(3585748): a, c, g or t
  modified_base (3585794)..(3585795): a, c, g or t
  modified_base (3589035)..(3589036): a, c, g or t
  modified_base (3589639)..(3589639): a, c, g or t
  modified_base (3591439)..(3591439): a, c, g or t
  modified_base (3591461)..(3591464): a, c, g or t
  modified_base (3591590)..(3591595): a, c, g or t
  modified_base (3591862)..(3591862): a, c, g or t
  modified_base (3593483)..(3593486): a, c, g or t
  modified_base (3594373)..(3594373): a, c, g or t
  modified_base (3594920)..(3594920): a, c, g or t
  modified_base (3596711)..(3596711): a, c, g or t
  modified_base (3596738)..(3596738): a, c, g or t
  modified_base (3600299)..(3600299): a, c, g or t
  modified_base (3600326)..(3600326): a, c, g or t
  modified_base (3600363)..(3600363): a, c, g or t
  modified_base (3600389)..(3600389): a, c, g or t
  modified_base (3600399)..(3600399): a, c, g or t
  modified_base (3600452)..(3600452): a, c, g or t
  modified_base (3600473)..(3600473): a, c, g or t
  modified_base (3600482)..(3600482): a, c, g or t
  modified_base (3601002)..(3601008): a, c, g or t
  modified_base (3601421)..(3601423): a, c, g or t
  modified_base (3601811)..(3601811): a, c, g or t
  modified_base (3602602)..(3602603): a, c, g or t
  modified_base (3602608)..(3602608): a, c, g or t
  modified_base (3602980)..(3602980): a, c, g or t
  modified_base (3604262)..(3604267): a, c, g or t
  modified_base (3604529)..(3604529): a, c, g or t
  modified_base (3604754)..(3604754): a, c, g or t
  modified_base (3606961)..(3606961): a, c, g or t
  modified_base (3612588)..(3612588): a, c, g or t
  modified_base (3613356)..(3613356): a, c, g or t
  modified_base (3613726)..(3613726): a, c, g or t
  modified_base (3613729)..(3613729): a, c, g or t
  modified_base (3613894)..(3613894): a, c, g or t
  modified_base (3614719)..(3614719): a, c, g or t
  modified_base (3615525)..(3615525): a, c, g or t
  modified_base (3615601)..(3615603): a, c, g or t
  modified_base (3619095)..(3619095): a, c, g or t
  modified_base (3619542)..(3619542): a, c, g or t
  modified_base (3620424)..(3620424): a, c, g or t
  modified_base (3621826)..(3621829): a, c, g or t
  modified_base (3622342)..(3622350): a, c, g or t
  modified_base (3622808)..(3622808): a, c, g or t
  modified_base (3622855)..(3622855): a, c, g or t
  modified_base (3623162)..(3623162): a, c, g or t
  modified_base (3623529)..(3623529): a, c, g or t
  modified_base (3623740)..(3623740): a, c, g or t
  modified_base (3624899)..(3624911): a, c, g or t
  modified_base (3627746)..(3627746): a, c, g or t
  modified_base (3629564)..(3629567): a, c, g or t
  modified_base (3631435)..(3631435): a, c, g or t
  modified_base (3635151)..(3635151): a, c, g or t
  modified_base (3636289)..(3636289): a, c, g or t
  modified_base (3636291)..(3636294): a, c, g or t
  modified_base (3636526)..(3636529): a, c, g or t
  modified_base (3636533)..(3636538): a, c, g or t
  modified_base (3636851)..(3636851): a, c, g or t
  modified_base (3637361)..(3637361): a, c, g or t
  modified_base (3637995)..(3637998): a, c, g or t
  modified_base (3639140)..(3639140): a, c, g or t
  modified_base (3639674)..(3639674): a, c, g or t
  modified_base (3643396)..(3643396): a, c, g or t
  modified_base (3643552)..(3643559): a, c, g or t
  modified_base (3643757)..(3643765): a, c, g or t
  modified_base (3644226)..(3644226): a, c, g or t
  modified_base (3646706)..(3646713): a, c, g or t
  modified_base (3647755)..(3647755): a, c, g or t
  modified_base (3648202)..(3648202): a, c, g or t
  modified_base (3648745)..(3648745): a, c, g or t
  modified_base (3649348)..(3649348): a, c, g or t
  modified_base (3649440)..(3649440): a, c, g or t
  modified_base (3650389)..(3650389): a, c, g or t
  modified_base (3652088)..(3652088): a, c, g or t
  modified_base (3657114)..(3657114): a, c, g or t
  modified_base (3657347)..(3657347): a, c, g or t
  modified_base (3658112)..(3658113): a, c, g or t
  modified_base (3658116)..(3658117): a, c, g or t
  modified_base (3658119)..(3658124): a, c, g or t
  modified_base (3658178)..(3658197): a, c, g or t
  modified_base (3663549)..(3663549): a, c, g or t
  modified_base (3663777)..(3663777): a, c, g or t
  modified_base (3666444)..(3666444): a, c, g or t
  modified_base (3668485)..(3668485): a, c, g or t
  modified_base (3668515)..(3668515): a, c, g or t
  modified_base (3669368)..(3669371): a, c, g or t
  modified_base (3671456)..(3671456): a, c, g or t
  modified_base (3672890)..(3672890): a, c, g or t
  modified_base (3674123)..(3674123): a, c, g or t
  modified_base (3674813)..(3674813): a, c, g or t
  modified_base (3676512)..(3676512): a, c, g or t
  modified_base (3676817)..(3676817): a, c, g or t
  modified_base (3677955)..(3677955): a, c, g or t
  modified_base (3679852)..(3679852): a, c, g or t
  modified_base (3681271)..(3681275): a, c, g or t
  modified_base (3681835)..(3681835): a, c, g or t
  modified_base (3682789)..(3682789): a, c, g or t
  modified_base (3683579)..(3683582): a, c, g or t
  modified_base (3684054)..(3684055): a, c, g or t
  modified_base (3684575)..(3684575): a, c, g or t
  modified_base (3685071)..(3685071): a, c, g or t
  modified_base (3685488)..(3685488): a, c, g or t
  modified_base (3688431)..(3688431): a, c, g or t
  modified_base (3689411)..(3689411): a, c, g or t
  modified_base (3691407)..(3691407): a, c, g or t
  modified_base (3693291)..(3693291): a, c, g or t
  modified_base (3693996)..(3694001): a, c, g or t
  modified_base (3695551)..(3695551): a, c, g or t
  modified_base (3695567)..(3695567): a, c, g or t
  modified_base (3696854)..(3696854): a, c, g or t
  modified_base (3701656)..(3701668): a, c, g or t
  modified_base (3702790)..(3702790): a, c, g or t
  modified_base (3706152)..(3706152): a, c, g or t
  modified_base (3706157)..(3706157): a, c, g or t
  modified_base (3712369)..(3712370): a, c, g or t
  modified_base (3712374)..(3712375): a, c, g or t
  modified_base (3712377)..(3712378): a, c, g or t
  modified_base (3716735)..(3716735): a, c, g or t
  modified_base (3719758)..(3719765): a, c, g or t
  modified_base (3720717)..(3720718): a, c, g or t
  modified_base (3723666)..(3723666): a, c, g or t
  modified_base (3726007)..(3726007): a, c, g or t
  modified_base (3726465)..(3726465): a, c, g or t
  modified_base (3728336)..(3728336): a, c, g or t
  modified_base (3729176)..(3729176): a, c, g or t
  modified_base (3730560)..(3730560): a, c, g or t
  modified_base (3732921)..(3732921): a, c, g or t
  modified_base (3736595)..(3736595): a, c, g or t
  modified_base (3737340)..(3737340): a, c, g or t
  modified_base (3737369)..(3737369): a, c, g or t
  modified_base (3737738)..(3737738): a, c, g or t
  modified_base (3738314)..(3738317): a, c, g or t
  modified_base (3738543)..(3738543): a, c, g or t
  modified_base (3739297)..(3739297): a, c, g or t
  modified_base (3744581)..(3744581): a, c, g or t
  modified_base (3745243)..(3745243): a, c, g or t
  modified_base (3746263)..(3746263): a, c, g or t
  modified_base (3746382)..(3746382): a, c, g or t
  modified_base (3749405)..(3749406): a, c, g or t
  modified_base (3749712)..(3749712): a, c, g or t
  modified_base (3749756)..(3749760): a, c, g or t
  modified_base (3752578)..(3752578): a, c, g or t
  modified_base (3753132)..(3753132): a, c, g or t
  modified_base (3754082)..(3754087): a, c, g or t
  modified_base (3755319)..(3755319): a, c, g or t
  modified_base (3755895)..(3755895): a, c, g or t
  modified_base (3757956)..(3757956): a, c, g or t
  modified_base (3760115)..(3760115): a, c, g or t
  modified_base (3761391)..(3761395): a, c, g or t
  modified_base (3761398)..(3761399): a, c, g or t
  modified_base (3762798)..(3762798): a, c, g or t
  modified_base (3763915)..(3763915): a, c, g or t
  modified_base (3764143)..(3764143): a, c, g or t
  modified_base (3769877)..(3769882): a, c, g or t
  modified_base (3772608)..(3772608): a, c, g or t
  modified_base (3772612)..(3772612): a, c, g or t
  modified_base (3773026)..(3773026): a, c, g or t
  modified_base (3773324)..(3773344): a, c, g or t
  modified_base (3773347)..(3773351): a, c, g or t
  modified_base (3773850)..(3773850): a, c, g or t
  modified_base (3774358)..(3774361): a, c, g or t
  modified_base (3776468)..(3776471): a, c, g or t
  modified_base (3778759)..(3778759): a, c, g or t
  modified_base (3781398)..(3781398): a, c, g or t
  modified_base (3781968)..(3781968): a, c, g or t
  modified_base (3782124)..(3782124): a, c, g or t
  modified_base (3783077)..(3783077): a, c, g or t
  modified_base (3783267)..(3783268): a, c, g or t
  modified_base (3785227)..(3785228): a, c, g or t
  modified_base (3785231)..(3785231): a, c, g or t
  modified_base (3787014)..(3787015): a, c, g or t
  modified_base (3787038)..(3787038): a, c, g or t
  modified_base (3787056)..(3787057): a, c, g or t
  modified_base (3787241)..(3787241): a, c, g or t
  modified_base (3787291)..(3787291): a, c, g or t
  modified_base (3787293)..(3787294): a, c, g or t
  modified_base (3787470)..(3787470): a, c, g or t
  modified_base (3788907)..(3788910): a, c, g or t
  modified_base (3789329)..(3789330): a, c, g or t
  modified_base (3789478)..(3789479): a, c, g or t
  modified_base (3789495)..(3789495): a, c, g or t
  modified_base (3789530)..(3789559): a, c, g or t
  modified_base (3789727)..(3789728): a, c, g or t
  modified_base (3789804)..(3789805): a, c, g or t
  modified_base (3789809)..(3789810): a, c, g or t
  modified_base (3789838)..(3789838): a, c, g or t
  modified_base (3789919)..(3789920): a, c, g or t
  modified_base (3790096)..(3790096): a, c, g or t
  modified_base (3790101)..(3790101): a, c, g or t
  modified_base (3790103)..(3790121): a, c, g or t
  modified_base (3790126)..(3790126): a, c, g or t
  modified_base (3790149)..(3790150): a, c, g or t
  modified_base (3790154)..(3790155): a, c, g or t
  modified_base (3790378)..(3790381): a, c, g or t
  modified_base (3790515)..(3790515): a, c, g or t
  modified_base (3790887)..(3790887): a, c, g or t
  modified_base (3791034)..(3791034): a, c, g or t
  modified_base (3791193)..(3791212): a, c, g or t
  modified_base (3792368)..(3792408): a, c, g or t
  modified_base (3796022)..(3796022): a, c, g or t
  modified_base (3797264)..(3797264): a, c, g or t
  modified_base (3799100)..(3799100): a, c, g or t
  modified_base (3800648)..(3800648): a, c, g or t
  modified_base (3802297)..(3802297): a, c, g or t
  modified_base (3802915)..(3802924): a, c, g or t
  modified_base (3812708)..(3812708): a, c, g or t
  modified_base (3813834)..(3813834): a, c, g or t
  modified_base (3817355)..(3817355): a, c, g or t
  modified_base (3818053)..(3818056): a, c, g or t
  modified_base (3818329)..(3818336): a, c, g or t
  modified_base (3820931)..(3820931): a, c, g or t
  modified_base (3822851)..(3822851): a, c, g or t
  modified_base (3823536)..(3823536): a, c, g or t
  modified_base (3824349)..(3824349): a, c, g or t
  modified_base (3824796)..(3824796): a, c, g or t
  modified_base (3824934)..(3824934): a, c, g or t
  modified_base (3826097)..(3826114): a, c, g or t
  modified_base (3828883)..(3828883): a, c, g or t
  modified_base (3831264)..(3831264): a, c, g or t
  modified_base (3831266)..(3831266): a, c, g or t
  modified_base (3831718)..(3831719): a, c, g or t
  modified_base (3832785)..(3832785): a, c, g or t
  modified_base (3835626)..(3835626): a, c, g or t
  modified_base (3837116)..(3837116): a, c, g or t
  modified_base (3839937)..(3839940): a, c, g or t
  modified_base (3839944)..(3839944): a, c, g or t
  modified_base (3843435)..(3843435): a, c, g or t
  modified_base (3844400)..(3844400): a, c, g or t
  modified_base (3844423)..(3844423): a, c, g or t
  modified_base (3844426)..(3844426): a, c, g or t
  modified_base (3844456)..(3844456): a, c, g or t
  modified_base (3850671)..(3850680): a, c, g or t
  modified_base (3850682)..(3850683): a, c, g or t
  modified_base (3850711)..(3850711): a, c, g or t
  modified_base (3853605)..(3853605): a, c, g or t
  modified_base (3858660)..(3858664): a, c, g or t
  modified_base (3861164)..(3861167): a, c, g or t
  modified_base (3874142)..(3874142): a, c, g or t
  modified_base (3877944)..(3877948): a, c, g or t
  modified_base (3884540)..(3884540): a, c, g or t
  modified_base (3887677)..(3887677): a, c, g or t
  modified_base (3888557)..(3888557): a, c, g or t
  modified_base (3890393)..(3890393): a, c, g or t
  modified_base (3894806)..(3894806): a, c, g or t
  modified_base (3894926)..(3894926): a, c, g or t
  modified_base (3897086)..(3897086): a, c, g or t
  modified_base (3899568)..(3899568): a, c, g or t
  modified_base (3899965)..(3899965): a, c, g or t
  modified_base (3900594)..(3900594): a, c, g or t
  modified_base (3902788)..(3902788): a, c, g or t
  modified_base (3903037)..(3903037): a, c, g or t
  modified_base (3903050)..(3903050): a, c, g or t
  modified_base (3903053)..(3903053): a, c, g or t
  modified_base (3904432)..(3904432): a, c, g or t
  modified_base (3904434)..(3904434): a, c, g or t
  modified_base (3906095)..(3906100): a, c, g or t
  modified_base (3906109)..(3906109): a, c, g or t
  modified_base (3908783)..(3908783): a, c, g or t
  modified_base (3908950)..(3908950): a, c, g or t
  modified_base (3913247)..(3913247): a, c, g or t
  modified_base (3914455)..(3914455): a, c, g or t
  modified_base (3914723)..(3914723): a, c, g or t
  modified_base (3914744)..(3914744): a, c, g or t
  modified_base (3921334)..(3921346): a, c, g or t
  modified_base (3924175)..(3924175): a, c, g or t
  modified_base (3924338)..(3924338): a, c, g or t
  modified_base (3925305)..(3925308): a, c, g or t
  modified_base (3926179)..(3926184): a, c, g or t
  modified_base (3930223)..(3930226): a, c, g or t
  modified_base (3930933)..(3930933): a, c, g or t
  modified_base (3931005)..(3931005): a, c, g or t
  modified_base (3931033)..(3931042): a, c, g or t
  modified_base (3932814)..(3932814): a, c, g or t
  modified_base (3933174)..(3933174): a, c, g or t
  modified_base (3933605)..(3933605): a, c, g or t
  modified_base (3934766)..(3934773): a, c, g or t
  modified_base (3936018)..(3936018): a, c, g or t
  modified_base (3936919)..(3936924): a, c, g or t
  modified_base (3946319)..(3946319): a, c, g or t
  modified_base (3950737)..(3950743): a, c, g or t
  modified_base (3954681)..(3954681): a, c, g or t
  modified_base (3954690)..(3954690): a, c, g or t
  modified_base (3960574)..(3960574): a, c, g or t
  modified_base (3960576)..(3960577): a, c, g or t
  modified_base (3960580)..(3960581): a, c, g or t
  modified_base (3963507)..(3963510): a, c, g or t
  modified_base (3963670)..(3963679): a, c, g or t
  modified_base (3964224)..(3964224): a, c, g or t
  modified_base (3966262)..(3966262): a, c, g or t
  modified_base (3967086)..(3967086): a, c, g or t
  modified_base (3970568)..(3970568): a, c, g or t
  modified_base (3971338)..(3971338): a, c, g or t
  modified_base (3972407)..(3972408): a, c, g or t
  modified_base (3975795)..(3975795): a, c, g or t
  modified_base (3977416)..(3977416): a, c, g or t
  modified_base (3977859)..(3977859): a, c, g or t
  modified_base (3978946)..(3978949): a, c, g or t
  modified_base (3979298)..(3979298): a, c, g or t
  modified_base (3983744)..(3983747): a, c, g or t
  modified_base (3983749)..(3983753): a, c, g or t
  modified_base (3986716)..(3986719): a, c, g or t
  modified_base (3986794)..(3986794): a, c, g or t
  modified_base (3987735)..(3987749): a, c, g or t
  modified_base (3987842)..(3987842): a, c, g or t
  modified_base (3990404)..(3990406): a, c, g or t
  modified_base (3992861)..(3992862): a, c, g or t
  modified_base (3992869)..(3992870): a, c, g or t
  modified_base (3993115)..(3993115): a, c, g or t
  modified_base (3993336)..(3993336): a, c, g or t
  modified_base (3995518)..(3995518): a, c, g or t
  modified_base (3995532)..(3995532): a, c, g or t
  modified_base (3996677)..(3996677): a, c, g or t
  modified_base (3996942)..(3996942): a, c, g or t
  modified_base (3999655)..(3999658): a, c, g or t
  modified_base (4000321)..(4000321): a, c, g or t
  modified_base (4001798)..(4001798): a, c, g or t
  modified_base (4002296)..(4002296): a, c, g or t
  modified_base (4002685)..(4002688): a, c, g or t
  modified_base (4004528)..(4004528): a, c, g or t
  modified_base (4008432)..(4008432): a, c, g or t
  modified_base (4010113)..(4010113): a, c, g or t
  modified_base (4012579)..(4012579): a, c, g or t
  modified_base (4013833)..(4013836): a, c, g or t
  modified_base (4015561)..(4015561): a, c, g or t
  modified_base (4016117)..(4016117): a, c, g or t
  modified_base (4016979)..(4016979): a, c, g or t
  modified_base (4017458)..(4017458): a, c, g or t
  modified_base (4017462)..(4017465): a, c, g or t
  modified_base (4019776)..(4019776): a, c, g or t
  modified_base (4019844)..(4019844): a, c, g or t
  modified_base (4024915)..(4024915): a, c, g or t
  modified_base (4031924)..(4031924): a, c, g or t
  modified_base (4035174)..(4035176): a, c, g or t
  modified_base (4035285)..(4035285): a, c, g or t
  modified_base (4035287)..(4035290): a, c, g or t
  modified_base (4035655)..(4035655): a, c, g or t
  modified_base (4035980)..(4035982): a, c, g or t
  modified_base (4038156)..(4038157): a, c, g or t
  modified_base (4038163)..(4038164): a, c, g or t
  modified_base (4038511)..(4038511): a, c, g or t
  modified_base (4040265)..(4040268): a, c, g or t
  modified_base (4040781)..(4040786): a, c, g or t
  modified_base (4041998)..(4041998): a, c, g or t
  modified_base (4045936)..(4045936): a, c, g or t
  modified_base (4046602)..(4046607): a, c, g or t
  modified_base (4048022)..(4048022): a, c, g or t
  modified_base (4050349)..(4050352): a, c, g or t
  modified_base (4050354)..(4050361): a, c, g or t
  modified_base (4050488)..(4050488): a, c, g or t
  modified_base (4050538)..(4050538): a, c, g or t
  modified_base (4054044)..(4054044): a, c, g or t
  modified_base (4054048)..(4054048): a, c, g or t
  modified_base (4055721)..(4055721): a, c, g or t
  modified_base (4059227)..(4059227): a, c, g or t
  modified_base (4060133)..(4060136): a, c, g or t
  modified_base (4060316)..(4060316): a, c, g or t
  modified_base (4061123)..(4061123): a, c, g or t
  modified_base (4062799)..(4062799): a, c, g or t
  modified_base (4062814)..(4062817): a, c, g or t
  modified_base (4062819)..(4062827): a, c, g or t
  modified_base (4062829)..(4062829): a, c, g or t
  modified_base (4063007)..(4063007): a, c, g or t
  modified_base (4063998)..(4063998): a, c, g or t
  modified_base (4064198)..(4064198): a, c, g or t
  modified_base (4064508)..(4064508): a, c, g or t
  modified_base (4065137)..(4065137): a, c, g or t
  modified_base (4066502)..(4066502): a, c, g or t
  modified_base (4067150)..(4067152): a, c, g or t
  modified_base (4068856)..(4068856): a, c, g or t
  modified_base (4069910)..(4069910): a, c, g or t
  modified_base (4069999)..(4069999): a, c, g or t
  modified_base (4071301)..(4071301): a, c, g or t
  modified_base (4072578)..(4072578): a, c, g or t
  modified_base (4075509)..(4075510): a, c, g or t
  modified_base (4075514)..(4075527): a, c, g or t
  modified_base (4076960)..(4076960): a, c, g or t
  modified_base (4080724)..(4080724): a, c, g or t
  modified_base (4081575)..(4081577): a, c, g or t
  modified_base (4083432)..(4083436): a, c, g or t
  modified_base (4084554)..(4084555): a, c, g or t
  modified_base (4085103)..(4085103): a, c, g or t
  modified_base (4085794)..(4085795): a, c, g or t
  modified_base (4085797)..(4085801): a, c, g or t
  modified_base (4086056)..(4086056): a, c, g or t
  modified_base (4086447)..(4086489): a, c, g or t
  modified_base (4086561)..(4086564): a, c, g or t
  modified_base (4086566)..(4086567): a, c, g or t
  modified_base (4086569)..(4086575): a, c, g or t
  modified_base (4086615)..(4086615): a, c, g or t
  modified_base (4086638)..(4086664): a, c, g or t
  modified_base (4089158)..(4089162): a, c, g or t
  modified_base (4090552)..(4090556): a, c, g or t
  modified_base (4091083)..(4091083): a, c, g or t
  modified_base (4092116)..(4092116): a, c, g or t
  modified_base (4096282)..(4096283): a, c, g or t
  modified_base (4097943)..(4097943): a, c, g or t
  modified_base (4098808)..(4098808): a, c, g or t
  modified_base (4098810)..(4098810): a, c, g or t
  modified_base (4101840)..(4101840): a, c, g or t
  modified_base (4102972)..(4102972): a, c, g or t
  modified_base (4104803)..(4104803): a, c, g or t
  modified_base (4109413)..(4109420): a, c, g or t
  modified_base (4112380)..(4112380): a, c, g or t
  modified_base (4112396)..(4112396): a, c, g or t
  modified_base (4115510)..(4115510): a, c, g or t
  modified_base (4121518)..(4121518): a, c, g or t
  modified_base (4121633)..(4121640): a, c, g or t
  modified_base (4121642)..(4121643): a, c, g or t
  modified_base (4127680)..(4127682): a, c, g or t
  modified_base (4128947)..(4128947): a, c, g or t
  modified_base (4129023)..(4129032): a, c, g or t
  modified_base (4129035)..(4129036): a, c, g or t
  modified_base (4129063)..(4129063): a, c, g or t
  modified_base (4129066)..(4129088): a, c, g or t
  modified_base (4131291)..(4131291): a, c, g or t
  modified_base (4131865)..(4131868): a, c, g or t
  modified_base (4133339)..(4133351): a, c, g or t
  modified_base (4133434)..(4133437): a, c, g or t
  modified_base (4133439)..(4133439): a, c, g or t
  modified_base (4133447)..(4133452): a, c, g or t
  modified_base (4133480)..(4133483): a, c, g or t
  modified_base (4133486)..(4133486): a, c, g or t
  modified_base (4133909)..(4133912): a, c, g or t
  modified_base (4133999)..(4133999): a, c, g or t
  modified_base (4134001)..(4134039): a, c, g or t
  modified_base (4134189)..(4134232): a, c, g or t
  modified_base (4136391)..(4136391): a, c, g or t
  modified_base (4136495)..(4136495): a, c, g or t
  modified_base (4136613)..(4136616): a, c, g or t
  modified_base (4136642)..(4136642): a, c, g or t
  modified_base (4136647)..(4136647): a, c, g or t
  modified_base (4136659)..(4136659): a, c, g or t
  modified_base (4136675)..(4136675): a, c, g or t
  modified_base (4136687)..(4136689): a, c, g or t
  modified_base (4137593)..(4137593): a, c, g or t
  modified_base (4138145)..(4138145): a, c, g or t
  modified_base (4138260)..(4138265): a, c, g or t
  modified_base (4140203)..(4140205): a, c, g or t
  modified_base (4143913)..(4143913): a, c, g or t
  modified_base (4144240)..(4144240): a, c, g or t
  modified_base (4147434)..(4147434): a, c, g or t
  modified_base (4150756)..(4150756): a, c, g or t
  modified_base (4150894)..(4150898): a, c, g or t
  modified_base (4152683)..(4152688): a, c, g or t
  modified_base (4153747)..(4153747): a, c, g or t
  modified_base (4153797)..(4153797): a, c, g or t
  modified_base (4156947)..(4156950): a, c, g or t
  modified_base (4157626)..(4157626): a, c, g or t
  modified_base (4159093)..(4159093): a, c, g or t
  modified_base (4160362)..(4160362): a, c, g or t
  modified_base (4163495)..(4163495): a, c, g or t
  modified_base (4165620)..(4165630): a, c, g or t
  modified_base (4166106)..(4166114): a, c, g or t
  modified_base (4168353)..(4168358): a, c, g or t
  modified_base (4170275)..(4170280): a, c, g or t
  modified_base (4172758)..(4172761): a, c, g or t
  modified_base (4173493)..(4173496): a, c, g or t
  modified_base (4175329)..(4175330): a, c, g or t
  modified_base (4176591)..(4176591): a, c, g or t
  modified_base (4178728)..(4178738): a, c, g or t
  modified_base (4182341)..(4182341): a, c, g or t
  modified_base (4182720)..(4182720): a, c, g or t
  modified_base (4183015)..(4183015): a, c, g or t
  modified_base (4184116)..(4184116): a, c, g or t
  modified_base (4185415)..(4185415): a, c, g or t
  modified_base (4185451)..(4185451): a, c, g or t
  modified_base (4185623)..(4185623): a, c, g or t
  modified_base (4187001)..(4187001): a, c, g or t
  modified_base (4187124)..(4187134): a, c, g or t
  modified_base (4188206)..(4188206): a, c, g or t
  modified_base (4188966)..(4188970): a, c, g or t
  modified_base (4190703)..(4190705): a, c, g or t
  modified_base (4193923)..(4193923): a, c, g or t
  modified_base (4195579)..(4195579): a, c, g or t
  modified_base (4197276)..(4197276): a, c, g or t
  modified_base (4202516)..(4202516): a, c, g or t
  modified_base (4202799)..(4202799): a, c, g or t
  modified_base (4206514)..(4206514): a, c, g or t
  modified_base (4211090)..(4211090): a, c, g or t
  modified_base (4213397)..(4213397): a, c, g or t
  modified_base (4213403)..(4213404): a, c, g or t
  modified_base (4213443)..(4213443): a, c, g or t
  modified_base (4213447)..(4213454): a, c, g or t
  modified_base (4213456)..(4213459): a, c, g or t
  modified_base (4213502)..(4213507): a, c, g or t
  modified_base (4213511)..(4213518): a, c, g or t
  modified_base (4213554)..(4213593): a, c, g or t
  modified_base (4213617)..(4213617): a, c, g or t
  modified_base (4213701)..(4213741): a, c, g or t
  modified_base (4214745)..(4214745): a, c, g or t
  modified_base (4215123)..(4215123): a, c, g or t
  modified_base (4215210)..(4215210): a, c, g or t
  modified_base (4215592)..(4215593): a, c, g or t
  modified_base (4215715)..(4215716): a, c, g or t
  modified_base (4216569)..(4216615): a, c, g or t
  modified_base (4216620)..(4216621): a, c, g or t
  modified_base (4216629)..(4216631): a, c, g or t
  modified_base (4216637)..(4216650): a, c, g or t
  modified_base (4216692)..(4216692): a, c, g or t
  modified_base (4216694)..(4216695): a, c, g or t
  modified_base (4216726)..(4216727): a, c, g or t
  modified_base (4216731)..(4216733): a, c, g or t
  modified_base (4216735)..(4216746): a, c, g or t
  modified_base (4216761)..(4216762): a, c, g or t
  modified_base (4216764)..(4216767): a, c, g or t
  modified_base (4216769)..(4216813): a, c, g or t
  modified_base (4216944)..(4216945): a, c, g or t
  modified_base (4216975)..(4216976): a, c, g or t
  modified_base (4216983)..(4216985): a, c, g or t
  modified_base (4216987)..(4216988): a, c, g or t
  modified_base (4217537)..(4217537): a, c, g or t
  modified_base (4219537)..(4219538): a, c, g or t
  modified_base (4221150)..(4221150): a, c, g or t
  modified_base (4221955)..(4221958): a, c, g or t
  modified_base (4221970)..(4221970): a, c, g or t
  modified_base (4222826)..(4222826): a, c, g or t
  modified_base (4223591)..(4223591): a, c, g or t
  modified_base (4223932)..(4223932): a, c, g or t
  modified_base (4226380)..(4226381): a, c, g or t
  modified_base (4226383)..(4226388): a, c, g or t
  modified_base (4226390)..(4226390): a, c, g or t
  modified_base (4227001)..(4227004): a, c, g or t
  modified_base (4227006)..(4227007): a, c, g or t
  modified_base (4227012)..(4227015): a, c, g or t
  modified_base (4229047)..(4229050): a, c, g or t
  modified_base (4229181)..(4229182): a, c, g or t
  modified_base (4229184)..(4229185): a, c, g or t
  modified_base (4231825)..(4231831): a, c, g or t
  modified_base (4232464)..(4232472): a, c, g or t
  modified_base (4236266)..(4236275): a, c, g or t
  modified_base (4237188)..(4237188): a, c, g or t
  modified_base (4240011)..(4240011): a, c, g or t
  modified_base (4241481)..(4241490): a, c, g or t
  modified_base (4243152)..(4243156): a, c, g or t
  modified_base (4243285)..(4243286): a, c, g or t
  modified_base (4243288)..(4243300): a, c, g or t
  modified_base (4245197)..(4245200): a, c, g or t
  modified_base (4245343)..(4245344): a, c, g or t
  modified_base (4245346)..(4245349): a, c, g or t
  modified_base (4245537)..(4245537): a, c, g or t
  modified_base (4245901)..(4245908): a, c, g or t
  modified_base (4245934)..(4245938): a, c, g or t
  modified_base (4246462)..(4246462): a, c, g or t
  modified_base (4247419)..(4247419): a, c, g or t
  modified_base (4247617)..(4247628): a, c, g or t
  modified_base (4248105)..(4248118): a, c, g or t
  modified_base (4248441)..(4248442): a, c, g or t
  modified_base (4248444)..(4248458): a, c, g or t
  modified_base (4248592)..(4248596): a, c, g or t
  modified_base (4253637)..(4253637): a, c, g or t
  modified_base (4255066)..(4255066): a, c, g or t
  modified_base (4256268)..(4256273): a, c, g or t
  modified_base (4258491)..(4258491): a, c, g or t
  modified_base (4261084)..(4261084): a, c, g or t
  modified_base (4261087)..(4261090): a, c, g or t
  modified_base (4261604)..(4261604): a, c, g or t
  modified_base (4262390)..(4262390): a, c, g or t
  modified_base (4262608)..(4262608): a, c, g or t
  modified_base (4262659)..(4262659): a, c, g or t
  modified_base (4264315)..(4264315): a, c, g or t
  modified_base (4264320)..(4264320): a, c, g or t
  modified_base (4266587)..(4266587): a, c, g or t
  modified_base (4266897)..(4266900): a, c, g or t
  modified_base (4267015)..(4267020): a, c, g or t
  modified_base (4269449)..(4269449): a, c, g or t
  modified_base (4269591)..(4269591): a, c, g or t
  modified_base (4269695)..(4269695): a, c, g or t
  modified_base (4270776)..(4270780): a, c, g or t
  modified_base (4270960)..(4270960): a, c, g or t
  modified_base (4273008)..(4273011): a, c, g or t
  modified_base (4274469)..(4274469): a, c, g or t
  modified_base (4275964)..(4275964): a, c, g or t
  modified_base (4276770)..(4276770): a, c, g or t
  modified_base (4281996)..(4281999): a, c, g or t
  modified_base (4282054)..(4282055): a, c, g or t
  modified_base (4282915)..(4282915): a, c, g or t
  modified_base (4283118)..(4283118): a, c, g or t
  modified_base (4283221)..(4283221): a, c, g or t
  modified_base (4292323)..(4292323): a, c, g or t
  modified_base (4292437)..(4292445): a, c, g or t
  modified_base (4292472)..(4292472): a, c, g or t
  modified_base (4293342)..(4293342): a, c, g or t
  modified_base (4293741)..(4293741): a, c, g or t
  modified_base (4297600)..(4297600): a, c, g or t
  modified_base (4298697)..(4298697): a, c, g or t
  modified_base (4300536)..(4300536): a, c, g or t
  modified_base (4301052)..(4301052): a, c, g or t
  modified_base (4302753)..(4302753): a, c, g or t
  modified_base (4308536)..(4308536): a, c, g or t
  modified_base (4309143)..(4309143): a, c, g or t
  modified_base (4310258)..(4310258): a, c, g or t
  modified_base (4311481)..(4311481): a, c, g or t
  modified_base (4314361)..(4314361): a, c, g or t
  modified_base (4316166)..(4316176): a, c, g or t
  modified_base (4316491)..(4316492): a, c, g or t
  modified_base (4317117)..(4317120): a, c, g or t
  modified_base (4318209)..(4318210): a, c, g or t
  modified_base (4318212)..(4318228): a, c, g or t
  modified_base (4318231)..(4318231): a, c, g or t
  modified_base (4319050)..(4319056): a, c, g or t
  modified_base (4320287)..(4320298): a, c, g or t
  modified_base (4322877)..(4322877): a, c, g or t
  modified_base (4327522)..(4327524): a, c, g or t
  modified_base (4331142)..(4331142): a, c, g or t
  modified_base (4331327)..(4331327): a, c, g or t
  modified_base (4331977)..(4331992): a, c, g or t
  modified_base (4332733)..(4332736): a, c, g or t
  modified_base (4334694)..(4334694): a, c, g or t
  modified_base (4334734)..(4334734): a, c, g or t
  modified_base (4338113)..(4338113): a, c, g or t
  modified_base (4341491)..(4341499): a, c, g or t
  modified_base (4343482)..(4343486): a, c, g or t
  modified_base (4343729)..(4343730): a, c, g or t
  modified_base (4343733)..(4343740): a, c, g or t
  modified_base (4343743)..(4343744): a, c, g or t
  modified_base (4351958)..(4351961): a, c, g or t
  modified_base (4354862)..(4354862): a, c, g or t
  modified_base (4354866)..(4354867): a, c, g or t
  modified_base (4355754)..(4355754): a, c, g or t
  modified_base (4356578)..(4356578): a, c, g or t
  modified_base (4360844)..(4360853): a, c, g or t
  modified_base (4362914)..(4362941): a, c, g or t
  modified_base (4362943)..(4362944): a, c, g or t
  modified_base (4362948)..(4362949): a, c, g or t
  modified_base (4362970)..(4362972): a, c, g or t
  modified_base (4363368)..(4363368): a, c, g or t
  modified_base (4363770)..(4363773): a, c, g or t
  modified_base (4364122)..(4364122): a, c, g or t
  modified_base (4364324)..(4364324): a, c, g or t
  modified_base (4364358)..(4364358): a, c, g or t
  modified_base (4364491)..(4364491): a, c, g or t
  modified_base (4364564)..(4364571): a, c, g or t
  modified_base (4364574)..(4364575): a, c, g or t
  modified_base (4364636)..(4364639): a, c, g or t
  modified_base (4364723)..(4364724): a, c, g or t
  modified_base (4365017)..(4365018): a, c, g or t
  modified_base (4365055)..(4365057): a, c, g or t
  modified_base (4367182)..(4367186): a, c, g or t
  modified_base (4370884)..(4370887): a, c, g or t
  modified_base (4370890)..(4370894): a, c, g or t
  modified_base (4374117)..(4374130): a, c, g or t
  modified_base (4374286)..(4374289): a, c, g or t
  modified_base (4374946)..(4374949): a, c, g or t
  modified_base (4375481)..(4375481): a, c, g or t
  modified_base (4376940)..(4376948): a, c, g or t
  modified_base (4376958)..(4376958): a, c, g or t
  modified_base (4380101)..(4380101): a, c, g or t
  modified_base (4381192)..(4381195): a, c, g or t
  modified_base (4381533)..(4381533): a, c, g or t
  modified_base (4388125)..(4388125): a, c, g or t
  modified_base (4388189)..(4388189): a, c, g or t
  modified_base (4393445)..(4393445): a, c, g or t
  modified_base (4393585)..(4393585): a, c, g or t
  modified_base (4395708)..(4395708): a, c, g or t
  modified_base (4396149)..(4396161): a, c, g or t
  modified_base (4396365)..(4396365): a, c, g or t
  modified_base (4398348)..(4398354): a, c, g or t
  modified_base (4401473)..(4401473): a, c, g or t
  modified_base (4402946)..(4402946): a, c, g or t
  modified_base (4403973)..(4403976): a, c, g or t
  modified_base (4404853)..(4404853): a, c, g or t
  modified_base (4404889)..(4404892): a, c, g or t
  modified_base (4405024)..(4405031): a, c, g or t
  modified_base (4405134)..(4405134): a, c, g or t
  modified_base (4406849)..(4406853): a, c, g or t
  modified_base (4408273)..(4408273): a, c, g or t
  modified_base (4410635)..(4410638): a, c, g or t
  modified_base (4411298)..(4411298): a, c, g or t
  modified_base (4411347)..(4411347): a, c, g or t
  modified_base (4411439)..(4411439): a, c, g or t
  modified_base (4411811)..(4411814): a, c, g or t
  modified_base (4412444)..(4412444): a, c, g or t
  modified_base (4412852)..(4412852): a, c, g or t
  modified_base (4413334)..(4413334): a, c, g or t
  modified_base (4415437)..(4415437): a, c, g or t
  modified_base (4416096)..(4416096): a, c, g or t
  modified_base (4416354)..(4416358): a, c, g or t
  modified_base (4416583)..(4416583): a, c, g or t
  modified_base (4416642)..(4416647): a, c, g or t
  modified_base (4418178)..(4418178): a, c, g or t
  modified_base (4419825)..(4419825): a, c, g or t
  modified_base (4420656)..(4420656): a, c, g or t
  modified_base (4421247)..(4421247): a, c, g or t
  modified_base (4421739)..(4421741): a, c, g or t
  modified_base (4422718)..(4422724): a, c, g or t
  modified_base (4424750)..(4424750): a, c, g or t
  modified_base (4425463)..(4425463): a, c, g or t
  modified_base (4426199)..(4426201): a, c, g or t
  modified_base (4426548)..(4426554): a, c, g or t
  modified_base (4427677)..(4427677): a, c, g or t
  modified_base (4429144)..(4429145): a, c, g or t
  modified_base (4431768)..(4431768): a, c, g or t
  modified_base (4436161)..(4436161): a, c, g or t
  modified_base (4436210)..(4436210): a, c, g or t
  modified_base (4436272)..(4436272): a, c, g or t
  modified_base (4437597)..(4437597): a, c, g or t
  modified_base (4441228)..(4441229): a, c, g or t
  modified_base (4441358)..(4441358): a, c, g or t
  modified_base (4445254)..(4445254): a, c, g or t
  modified_base (4446377)..(4446377): a, c, g or t
  modified_base (4446944)..(4446944): a, c, g or t
  modified_base (4447896)..(4447898): a, c, g or t
  modified_base (4448897)..(4448901): a, c, g or t
  modified_base (4449676)..(4449676): a, c, g or t
  modified_base (4450679)..(4450679): a, c, g or t
  modified_base (4451768)..(4451771): a, c, g or t
  modified_base (4452306)..(4452306): a, c, g or t
  modified_base (4454140)..(4454140): a, c, g or t
  modified_base (4454355)..(4454355): a, c, g or t
  modified_base (4458313)..(4458316): a, c, g or t
  modified_base (4458410)..(4458410): a, c, g or t
  modified_base (4458428)..(4458428): a, c, g or t
  modified_base (4458471)..(4458471): a, c, g or t
  modified_base (4458473)..(4458517): a, c, g or t
  modified_base (4458807)..(4458807): a, c, g or t
  modified_base (4459001)..(4459001): a, c, g or t
  modified_base (4459092)..(4459097): a, c, g or t
  modified_base (4459099)..(4459100): a, c, g or t
  modified_base (4459401)..(4459401): a, c, g or t
  modified_base (4459857)..(4459863): a, c, g or t
  modified_base (4460352)..(4460357): a, c, g or t
  modified_base (4460603)..(4460631): a, c, g or t
  modified_base (4460748)..(4460749): a, c, g or t
  modified_base (4460776)..(4460776): a, c, g or t
  modified_base (4460786)..(4460788): a, c, g or t
  modified_base (4460961)..(4460993): a, c, g or t
  modified_base (4461009)..(4461009): a, c, g or t
  modified_base (4461061)..(4461061): a, c, g or t
  modified_base (4461076)..(4461076): a, c, g or t
  modified_base (4461178)..(4461206): a, c, g or t
  modified_base (4461257)..(4461260): a, c, g or t
  modified_base (4461264)..(4461264): a, c, g or t
  modified_base (4461401)..(4461402): a, c, g or t
  modified_base (4461407)..(4461408): a, c, g or t
  modified_base (4461998)..(4461999): a, c, g or t
  modified_base (4462307)..(4462307): a, c, g or t
  modified_base (4463209)..(4463212): a, c, g or t
  modified_base (4463285)..(4463286): a, c, g or t
  modified_base (4463290)..(4463291): a, c, g or t
  modified_base (4463298)..(4463300): a, c, g or t
  modified_base (4463439)..(4463440): a, c, g or t
  modified_base (4463446)..(4463447): a, c, g or t
  modified_base (4464757)..(4464757): a, c, g or t
  modified_base (4467049)..(4467052): a, c, g or t
  modified_base (4467332)..(4467333): a, c, g or t
  modified_base (4467555)..(4467563): a, c, g or t
  modified_base (4470324)..(4470324): a, c, g or t
  modified_base (4472388)..(4472388): a, c, g or t
  modified_base (4474738)..(4474738): a, c, g or t
  modified_base (4474892)..(4474892): a, c, g or t
  modified_base (4474908)..(4474912): a, c, g or t
  modified_base (4476261)..(4476261): a, c, g or t
  modified_base (4477226)..(4477234): a, c, g or t
  modified_base (4478088)..(4478088): a, c, g or t
  modified_base (4479363)..(4479363): a, c, g or t
  modified_base (4479395)..(4479398): a, c, g or t
  modified_base (4479402)..(4479403): a, c, g or t
  modified_base (4480103)..(4480104): a, c, g or t
  modified_base (4480107)..(4480113): a, c, g or t
  modified_base (4480177)..(4480177): a, c, g or t
  modified_base (4480894)..(4480894): a, c, g or t
  modified_base (4481445)..(4481445): a, c, g or t
  modified_base (4485031)..(4485034): a, c, g or t
  modified_base (4487656)..(4487656): a, c, g or t
  modified_base (4488282)..(4488282): a, c, g or t
  modified_base (4488336)..(4488340): a, c, g or t
  modified_base (4493995)..(4493995): a, c, g or t
  modified_base (4494853)..(4494856): a, c, g or t
  modified_base (4495277)..(4495277): a, c, g or t
  modified_base (4495392)..(4495392): a, c, g or t
  modified_base (4495445)..(4495445): a, c, g or t
  modified_base (4495471)..(4495471): a, c, g or t
  modified_base (4496134)..(4496146): a, c, g or t
  modified_base (4496231)..(4496231): a, c, g or t
  modified_base (4496311)..(4496311): a, c, g or t
  modified_base (4496340)..(4496340): a, c, g or t
  modified_base (4496518)..(4496521): a, c, g or t
  modified_base (4497167)..(4497167): a, c, g or t
  modified_base (4499012)..(4499012): a, c, g or t
  modified_base (4501685)..(4501685): a, c, g or t
  modified_base (4502383)..(4502383): a, c, g or t
  modified_base (4504186)..(4504189): a, c, g or t
  modified_base (4504892)..(4504892): a, c, g or t
  modified_base (4505163)..(4505163): a, c, g or t
  modified_base (4507625)..(4507625): a, c, g or t
  modified_base (4510304)..(4510304): a, c, g or t
  modified_base (4511183)..(4511183): a, c, g or t
  modified_base (4511556)..(4511562): a, c, g or t
  modified_base (4511996)..(4512004): a, c, g or t
  modified_base (4512561)..(4512563): a, c, g or t
  modified_base (4515950)..(4515950): a, c, g or t
  modified_base (4516205)..(4516205): a, c, g or t
  modified_base (4516949)..(4516952): a, c, g or t
  modified_base (4518733)..(4518733): a, c, g or t
  modified_base (4521693)..(4521698): a, c, g or t
  modified_base (4521759)..(4521806): a, c, g or t
  modified_base (4522230)..(4522231): a, c, g or t
  modified_base (4522774)..(4522774): a, c, g or t
  modified_base (4523685)..(4523685): a, c, g or t
  modified_base (4531418)..(4531418): a, c, g or t
  modified_base (4533797)..(4533797): a, c, g or t
  modified_base (4536652)..(4536653): a, c, g or t
  modified_base (4536932)..(4536932): a, c, g or t
  modified_base (4537462)..(4537462): a, c, g or t
  modified_base (4537467)..(4537467): a, c, g or t
  modified_base (4538314)..(4538314): a, c, g or t
  modified_base (4538398)..(4538398): a, c, g or t
  modified_base (4538767)..(4538770): a, c, g or t
  modified_base (4538772)..(4538773): a, c, g or t
  modified_base (4538943)..(4538943): a, c, g or t
  modified_base (4538966)..(4538966): a, c, g or t
  modified_base (4542381)..(4542381): a, c, g or t
  modified_base (4542384)..(4542384): a, c, g or t
  modified_base (4542732)..(4542733): a, c, g or t
  modified_base (4545446)..(4545446): a, c, g or t
  modified_base (4548671)..(4548671): a, c, g or t
  modified_base (4551545)..(4551548): a, c, g or t
  modified_base (4554481)..(4554481): a, c, g or t
  modified_base (4556026)..(4556035): a, c, g or t
  modified_base (4556221)..(4556221): a, c, g or t
  modified_base (4556287)..(4556287): a, c, g or t
  modified_base (4556320)..(4556320): a, c, g or t
  modified_base (4556770)..(4556771): a, c, g or t
  modified_base (4556853)..(4556856): a, c, g or t
  modified_base (4556859)..(4556860): a, c, g or t
  modified_base (4556889)..(4556890): a, c, g or t
  modified_base (4556943)..(4556944): a, c, g or t
  modified_base (4557115)..(4557116): a, c, g or t
  modified_base (4557201)..(4557201): a, c, g or t
  modified_base (4557233)..(4557256): a, c, g or t
  modified_base (4557358)..(4557358): a, c, g or t
  modified_base (4558200)..(4558203): a, c, g or t
  modified_base (4558223)..(4558223): a, c, g or t
  modified_base (4559301)..(4559301): a, c, g or t
  modified_base (4559394)..(4559399): a, c, g or t
  modified_base (4559401)..(4559401): a, c, g or t
  modified_base (4559403)..(4559404): a, c, g or t
  modified_base (4559406)..(4559407): a, c, g or t
  modified_base (4559432)..(4559433): a, c, g or t
  modified_base (4559583)..(4559592): a, c, g or t
  modified_base (4559706)..(4559709): a, c, g or t
  modified_base (4559716)..(4559717): a, c, g or t
  modified_base (4559742)..(4559742): a, c, g or t
  modified_base (4559802)..(4559802): a, c, g or t
  modified_base (4561687)..(4561687): a, c, g or t
  modified_base (4568848)..(4568848): a, c, g or t
  modified_base (4568936)..(4568936): a, c, g or t
  modified_base (4569474)..(4569474): a, c, g or t
  modified_base (4571100)..(4571100): a, c, g or t
  modified_base (4571204)..(4571207): a, c, g or t
  modified_base (4571210)..(4571210): a, c, g or t
  modified_base (4571730)..(4571730): a, c, g or t
  modified_base (4573383)..(4573386): a, c, g or t
  modified_base (4574101)..(4574101): a, c, g or t
  modified_base (4574287)..(4574287): a, c, g or t
  modified_base (4574457)..(4574457): a, c, g or t
  modified_base (4581485)..(4581485): a, c, g or t
  modified_base (4583353)..(4583353): a, c, g or t
  modified_base (4586235)..(4586235): a, c, g or t
  modified_base (4588123)..(4588123): a, c, g or t
  modified_base (4588390)..(4588390): a, c, g or t
  modified_base (4594950)..(4594950): a, c, g or t
  modified_base (4597813)..(4597813): a, c, g or t
  modified_base (4598154)..(4598154): a, c, g or t
  modified_base (4598219)..(4598219): a, c, g or t
  modified_base (4599388)..(4599393): a, c, g or t
  modified_base (4600518)..(4600518): a, c, g or t
  modified_base (4602868)..(4602869): a, c, g or t
  modified_base (4603707)..(4603707): a, c, g or t
  modified_base (4603745)..(4603745): a, c, g or t
  modified_base (4604137)..(4604141): a, c, g or t
  modified_base (4604767)..(4604767): a, c, g or t
  modified_base (4605228)..(4605243): a, c, g or t
  modified_base (4605248)..(4605248): a, c, g or t
  modified_base (4605351)..(4605351): a, c, g or t
  modified_base (4605462)..(4605462): a, c, g or t
  modified_base (4605629)..(4605629): a, c, g or t
  modified_base (4605637)..(4605661): a, c, g or t
  modified_base (4605860)..(4605860): a, c, g or t
  modified_base (4606676)..(4606676): a, c, g or t
  modified_base (4606739)..(4606739): a, c, g or t
  modified_base (4607002)..(4607011): a, c, g or t
  modified_base (4607131)..(4607131): a, c, g or t
  modified_base (4618531)..(4618531): a, c, g or t
  modified_base (4620266)..(4620266): a, c, g or t
  modified_base (4621596)..(4621596): a, c, g or t
  modified_base (4623219)..(4623219): a, c, g or t
  modified_base (4626818)..(4626818): a, c, g or t
  modified_base (4628031)..(4628031): a, c, g or t
  modified_base (4628270)..(4628278): a, c, g or t
  modified_base (4628760)..(4628760): a, c, g or t
  modified_base (4630259)..(4630259): a, c, g or t
  modified_base (4630262)..(4630262): a, c, g or t
  modified_base (4630290)..(4630290): a, c, g or t
  modified_base (4630335)..(4630335): a, c, g or t
  modified_base (4630352)..(4630352): a, c, g or t
  modified_base (4630363)..(4630363): a, c, g or t
  modified_base (4630387)..(4630387): a, c, g or t
  modified_base (4630454)..(4630454): a, c, g or t
  modified_base (4630471)..(4630471): a, c, g or t
  modified_base (4631267)..(4631267): a, c, g or t
  modified_base (4631792)..(4631795): a, c, g or t
  modified_base (4632635)..(4632641): a, c, g or t
  modified_base (4632841)..(4632841): a, c, g or t
  modified_base (4633122)..(4633122): a, c, g or t
  modified_base (4634836)..(4634836): a, c, g or t
  modified_base (4635592)..(4635592): a, c, g or t
  modified_base (4636546)..(4636546): a, c, g or t
  modified_base (4636930)..(4636930): a, c, g or t
  modified_base (4636974)..(4636977): a, c, g or t
  modified_base (4638811)..(4638811): a, c, g or t
  modified_base (4638813)..(4638817): a, c, g or t
  modified_base (4639146)..(4639146): a, c, g or t
  modified_base (4639148)..(4639148): a, c, g or t
  modified_base (4640127)..(4640127): a, c, g or t
  modified_base (4640811)..(4640811): a, c, g or t
  modified_base (4641710)..(4641710): a, c, g or t
  modified_base (4642331)..(4642331): a, c, g or t
  modified_base (4642888)..(4642888): a, c, g or t
  modified_base (4643741)..(4643747): a, c, g or t
  modified_base (4644068)..(4644068): a, c, g or t
  modified_base (4644475)..(4644475): a, c, g or t
  modified_base (4644483)..(4644484): a, c, g or t
  modified_base (4644490)..(4644494): a, c, g or t
  modified_base (4644615)..(4644615): a, c, g or t
  modified_base (4644632)..(4644635): a, c, g or t
  modified_base (4644885)..(4644885): a, c, g or t
  modified_base (4644949)..(4644951): a, c, g or t
  modified_base (4644954)..(4644957): a, c, g or t
  modified_base (4645067)..(4645067): a, c, g or t
  modified_base (4645154)..(4645154): a, c, g or t
  modified_base (4645223)..(4645223): a, c, g or t
  modified_base (4645231)..(4645231): a, c, g or t
  modified_base (4645239)..(4645240): a, c, g or t
  modified_base (4645259)..(4645259): a, c, g or t
  modified_base (4645357)..(4645358): a, c, g or t
  modified_base (4645643)..(4645643): a, c, g or t
  modified_base (4645774)..(4645774): a, c, g or t
  modified_base (4645778)..(4645778): a, c, g or t
  modified_base (4645860)..(4645860): a, c, g or t
  modified_base (4646048)..(4646048): a, c, g or t
  modified_base (4646237)..(4646238): a, c, g or t
  modified_base (4646241)..(4646242): a, c, g or t
  modified_base (4646244)..(4646245): a, c, g or t
  modified_base (4646249)..(4646250): a, c, g or t
  modified_base (4646258)..(4646268): a, c, g or t
  modified_base (4646362)..(4646372): a, c, g or t
  modified_base (4646473)..(4646473): a, c, g or t
  modified_base (4646527)..(4646528): a, c, g or t
  modified_base (4646715)..(4646716): a, c, g or t
  modified_base (4646726)..(4646729): a, c, g or t
  modified_base (4646731)..(4646733): a, c, g or t
  modified_base (4646736)..(4646737): a, c, g or t
  modified_base (4646739)..(4646740): a, c, g or t
  modified_base (4646763)..(4646763): a, c, g or t
  modified_base (4646773)..(4646773): a, c, g or t
  modified_base (4647115)..(4647115): a, c, g or t
  modified_base (4647256)..(4647259): a, c, g or t
  modified_base (4647336)..(4647336): a, c, g or t
  modified_base (4647339)..(4647346): a, c, g or t
  modified_base (4647349)..(4647349): a, c, g or t
  modified_base (4647982)..(4647982): a, c, g or t
  modified_base (4648148)..(4648148): a, c, g or t
  modified_base (4648243)..(4648243): a, c, g or t
  modified_base (4648275)..(4648275): a, c, g or t
  modified_base (4648297)..(4648297): a, c, g or t
  modified_base (4651015)..(4651015): a, c, g or t
  modified_base (4653034)..(4653034): a, c, g or t
  modified_base (4656893)..(4656893): a, c, g or t
  modified_base (4656899)..(4656899): a, c, g or t
  modified_base (4657711)..(4657711): a, c, g or t
  modified_base (4657713)..(4657713): a, c, g or t
  modified_base (4658388)..(4658392): a, c, g or t
  modified_base (4659301)..(4659301): a, c, g or t
  modified_base (4659813)..(4659813): a, c, g or t
  modified_base (4662261)..(4662270): a, c, g or t
  modified_base (4663527)..(4663533): a, c, g or t
  modified_base (4664404)..(4664411): a, c, g or t
  modified_base (4664421)..(4664421): a, c, g or t
  modified_base (4669178)..(4669178): a, c, g or t
  modified_base (4670193)..(4670196): a, c, g or t
  modified_base (4670344)..(4670344): a, c, g or t
  modified_base (4671254)..(4671254): a, c, g or t
  modified_base (4671824)..(4671826): a, c, g or t
  modified_base (4673089)..(4673089): a, c, g or t
  modified_base (4675090)..(4675090): a, c, g or t
  modified_base (4677206)..(4677206): a, c, g or t
  modified_base (4678188)..(4678188): a, c, g or t
  modified_base (4679677)..(4679677): a, c, g or t
  modified_base (4679996)..(4679996): a, c, g or t
  modified_base (4680252)..(4680252): a, c, g or t
  modified_base (4681440)..(4681440): a, c, g or t
  modified_base (4681510)..(4681510): a, c, g or t
  modified_base (4685923)..(4685923): a, c, g or t
  modified_base (4686494)..(4686494): a, c, g or t
  modified_base (4687469)..(4687469): a, c, g or t
  modified_base (4691197)..(4691200): a, c, g or t
  modified_base (4691767)..(4691767): a, c, g or t
  modified_base (4691973)..(4691973): a, c, g or t
  modified_base (4692301)..(4692305): a, c, g or t
  modified_base (4692542)..(4692553): a, c, g or t
  modified_base (4693608)..(4693614): a, c, g or t
  modified_base (4695026)..(4695026): a, c, g or t
  modified_base (4695238)..(4695238): a, c, g or t
  modified_base (4696932)..(4696932): a, c, g or t
  modified_base (4696949)..(4696949): a, c, g or t
  modified_base (4699645)..(4699645): a, c, g or t
  modified_base (4701250)..(4701250): a, c, g or t
  modified_base (4701645)..(4701645): a, c, g or t
  modified_base (4702918)..(4702918): a, c, g or t
  modified_base (4702930)..(4702933): a, c, g or t
  modified_base (4702937)..(4702938): a, c, g or t
  modified_base (4704254)..(4704254): a, c, g or t
  modified_base (4704830)..(4704830): a, c, g or t
  modified_base (4704944)..(4704944): a, c, g or t
  modified_base (4705360)..(4705363): a, c, g or t
  modified_base (4706472)..(4706472): a, c, g or t
  modified_base (4706860)..(4706860): a, c, g or t
  modified_base (4709924)..(4709924): a, c, g or t
  modified_base (4710191)..(4710195): a, c, g or t
  modified_base (4712026)..(4712026): a, c, g or t
  modified_base (4714400)..(4714400): a, c, g or t
  modified_base (4715141)..(4715144): a, c, g or t
  modified_base (4715349)..(4715349): a, c, g or t
  modified_base (4716112)..(4716112): a, c, g or t
  modified_base (4716835)..(4716835): a, c, g or t
  modified_base (4716944)..(4716956): a, c, g or t
  modified_base (4716958)..(4716958): a, c, g or t
  modified_base (4718015)..(4718015): a, c, g or t
  modified_base (4718292)..(4718294): a, c, g or t
  modified_base (4721666)..(4721666): a, c, g or t
  modified_base (4726503)..(4726503): a, c, g or t
  modified_base (4726525)..(4726525): a, c, g or t
  modified_base (4727190)..(4727190): a, c, g or t
  modified_base (4727625)..(4727628): a, c, g or t
  modified_base (4729704)..(4729704): a, c, g or t
  modified_base (4729894)..(4729894): a, c, g or t
  modified_base (4730404)..(4730404): a, c, g or t
  modified_base (4730790)..(4730790): a, c, g or t
  modified_base (4732839)..(4732839): a, c, g or t
  modified_base (4734617)..(4734617): a, c, g or t
  modified_base (4736408)..(4736408): a, c, g or t
  modified_base (4736893)..(4736894): a, c, g or t
  modified_base (4738377)..(4738377): a, c, g or t
  modified_base (4739858)..(4739859): a, c, g or t
  modified_base (4739862)..(4739862): a, c, g or t
  modified_base (4740175)..(4740190): a, c, g or t
  modified_base (4741711)..(4741712): a, c, g or t
  modified_base (4741715)..(4741717): a, c, g or t
  modified_base (4742996)..(4742996): a, c, g or t
  modified_base (4745736)..(4745736): a, c, g or t
  modified_base (4746833)..(4746833): a, c, g or t
  modified_base (4748007)..(4748007): a, c, g or t
  modified_base (4748092)..(4748092): a, c, g or t
  modified_base (4748104)..(4748104): a, c, g or t
  modified_base (4749654)..(4749657): a, c, g or t
  modified_base (4750216)..(4750216): a, c, g or t
  modified_base (4751378)..(4751381): a, c, g or t
  modified_base (4751483)..(4751487): a, c, g or t
  modified_base (4752733)..(4752733): a, c, g or t
  modified_base (4752908)..(4752908): a, c, g or t
  modified_base (4753551)..(4753554): a, c, g or t
  modified_base (4753831)..(4753831): a, c, g or t
  modified_base (4754330)..(4754330): a, c, g or t
  modified_base (4754542)..(4754543): a, c, g or t
  modified_base (4754821)..(4754821): a, c, g or t
  modified_base (4754995)..(4754995): a, c, g or t
  modified_base (4755290)..(4755293): a, c, g or t
  modified_base (4755845)..(4755848): a, c, g or t
  modified_base (4756004)..(4756007): a, c, g or t
  modified_base (4757654)..(4757654): a, c, g or t
  modified_base (4757656)..(4757656): a, c, g or t
  modified_base (4757676)..(4757676): a, c, g or t
  modified_base (4757680)..(4757680): a, c, g or t
  modified_base (4758871)..(4758874): a, c, g or t
  modified_base (4759066)..(4759066): a, c, g or t
  modified_base (4759254)..(4759255): a, c, g or t
  modified_base (4759755)..(4759759): a, c, g or t
  modified_base (4759908)..(4759909): a, c, g or t
  modified_base (4761954)..(4761961): a, c, g or t
  modified_base (4761963)..(4761964): a, c, g or t
  modified_base (4761968)..(4761969): a, c, g or t
  modified_base (4762341)..(4762341): a, c, g or t
  modified_base (4762838)..(4762838): a, c, g or t
  modified_base (4769207)..(4769208): a, c, g or t
  modified_base (4769218)..(4769251): a, c, g or t
  modified_base (4769255)..(4769256): a, c, g or t
  modified_base (4769270)..(4769271): a, c, g or t
  modified_base (4769280)..(4769290): a, c, g or t
  modified_base (4769294)..(4769295): a, c, g or t
  modified_base (4769297)..(4769300): a, c, g or t
  modified_base (4774614)..(4774614): a, c, g or t
  modified_base (4781007)..(4781016): a, c, g or t
  modified_base (4781113)..(4781113): a, c, g or t
  modified_base (4781117)..(4781117): a, c, g or t
  modified_base (4782781)..(4782781): a, c, g or t
  modified_base (4783224)..(4783224): a, c, g or t
  modified_base (4783571)..(4783575): a, c, g or t
  modified_base (4783760)..(4783760): a, c, g or t
  modified_base (4785295)..(4785295): a, c, g or t
  modified_base (4786260)..(4786260): a, c, g or t
  modified_base (4786512)..(4786512): a, c, g or t
  modified_base (4789280)..(4789280): a, c, g or t
  modified_base (4789840)..(4789840): a, c, g or t
  modified_base (4795881)..(4795884): a, c, g or t
  modified_base (4797539)..(4797539): a, c, g or t
  modified_base (4801406)..(4801406): a, c, g or t
  modified_base (4802288)..(4802288): a, c, g or t
  modified_base (4803240)..(4803259): a, c, g or t
  modified_base (4809295)..(4809295): a, c, g or t
  modified_base (4809566)..(4809566): a, c, g or t
  modified_base (4810662)..(4810662): a, c, g or t
  modified_base (4811126)..(4811126): a, c, g or t
  modified_base (4814450)..(4814450): a, c, g or t
  modified_base (4815583)..(4815583): a, c, g or t
  modified_base (4815680)..(4815680): a, c, g or t
  modified_base (4816208)..(4816208): a, c, g or t
  modified_base (4816350)..(4816350): a, c, g or t
  modified_base (4816853)..(4816860): a, c, g or t
  modified_base (4816862)..(4816863): a, c, g or t
  modified_base (4817509)..(4817509): a, c, g or t
  modified_base (4817578)..(4817578): a, c, g or t
  modified_base (4818391)..(4818391): a, c, g or t
  modified_base (4820264)..(4820264): a, c, g or t
  modified_base (4821794)..(4821794): a, c, g or t
  modified_base (4821959)..(4821959): a, c, g or t
  modified_base (4829179)..(4829179): a, c, g or t
  modified_base (4831182)..(4831185): a, c, g or t
  modified_base (4834111)..(4834111): a, c, g or t
  modified_base (4834127)..(4834129): a, c, g or t
  modified_base (4834277)..(4834277): a, c, g or t
  modified_base (4834343)..(4834365): a, c, g or t
  modified_base (4834379)..(4834380): a, c, g or t
  modified_base (4834384)..(4834401): a, c, g or t
  modified_base (4834458)..(4834459): a, c, g or t
  modified_base (4834482)..(4834483): a, c, g or t
  modified_base (4836403)..(4836403): a, c, g or t
  modified_base (4837372)..(4837373): a, c, g or t
  modified_base (4839202)..(4839202): a, c, g or t
  modified_base (4839936)..(4839936): a, c, g or t
  modified_base (4841162)..(4841165): a, c, g or t
  modified_base (4846438)..(4846438): a, c, g or t
  modified_base (4846569)..(4846569): a, c, g or t
  modified_base (4847843)..(4847843): a, c, g or t
  modified_base (4848221)..(4848221): a, c, g or t
  modified_base (4849385)..(4849389): a, c, g or t
  modified_base (4849922)..(4849922): a, c, g or t
  modified_base (4850412)..(4850412): a, c, g or t
  modified_base (4850715)..(4850715): a, c, g or t
  modified_base (4851226)..(4851226): a, c, g or t
  modified_base (4851326)..(4851326): a, c, g or t
  modified_base (4851907)..(4851908): a, c, g or t
  modified_base (4852206)..(4852207): a, c, g or t
  modified_base (4853174)..(4853174): a, c, g or t
  modified_base (4854395)..(4854395): a, c, g or t
  modified_base (4854397)..(4854403): a, c, g or t
  modified_base (4854794)..(4854794): a, c, g or t
  modified_base (4855537)..(4855537): a, c, g or t
  modified_base (4856489)..(4856493): a, c, g or t
  modified_base (4857233)..(4857239): a, c, g or t
  modified_base (4859517)..(4859517): a, c, g or t
  modified_base (4861585)..(4861585): a, c, g or t
  modified_base (4862502)..(4862502): a, c, g or t
  modified_base (4863195)..(4863196): a, c, g or t
  modified_base (4866323)..(4866323): a, c, g or t
  modified_base (4869325)..(4869331): a, c, g or t
  modified_base (4873121)..(4873121): a, c, g or t
  modified_base (4876971)..(4876971): a, c, g or t
  modified_base (4877861)..(4877861): a, c, g or t
  modified_base (4882229)..(4882229): a, c, g or t
  modified_base (4882642)..(4882642): a, c, g or t
  modified_base (4883418)..(4883419): a, c, g or t
  modified_base (4883426)..(4883427): a, c, g or t
  modified_base (4883617)..(4883617): a, c, g or t
  modified_base (4883620)..(4883620): a, c, g or t
  modified_base (4886094)..(4886094): a, c, g or t
  modified_base (4888352)..(4888352): a, c, g or t
  modified_base (4888354)..(4888354): a, c, g or t
  modified_base (4888573)..(4888573): a, c, g or t
  modified_base (4889474)..(4889476): a, c, g or t
  modified_base (4896925)..(4896925): a, c, g or t
  modified_base (4903073)..(4903073): a, c, g or t
  modified_base (4906721)..(4906721): a, c, g or t
  modified_base (4906736)..(4906736): a, c, g or t
  modified_base (4906757)..(4906757): a, c, g or t
  modified_base (4907189)..(4907189): a, c, g or t
  modified_base (4908415)..(4908421): a, c, g or t
  modified_base (4908590)..(4908590): a, c, g or t
  modified_base (4910844)..(4910844): a, c, g or t
  modified_base (4912269)..(4912281): a, c, g or t
  modified_base (4912316)..(4912316): a, c, g or t
  modified_base (4912957)..(4912957): a, c, g or t
  modified_base (4914525)..(4914525): a, c, g or t
  modified_base (4915920)..(4915920): a, c, g or t
  modified_base (4918164)..(4918164): a, c, g or t
  modified_base (4918193)..(4918193): a, c, g or t
  modified_base (4919475)..(4919475): a, c, g or t
  modified_base (4919709)..(4919709): a, c, g or t
  modified_base (4919711)..(4919714): a, c, g or t
  modified_base (4919718)..(4919738): a, c, g or t
  modified_base (4919742)..(4919743): a, c, g or t
  modified_base (4919765)..(4919766): a, c, g or t
  modified_base (4919770)..(4919771): a, c, g or t
  modified_base (4920740)..(4920740): a, c, g or t
  modified_base (4922747)..(4922747): a, c, g or t
  modified_base (4922890)..(4922890): a, c, g or t
  modified_base (4929724)..(4929724): a, c, g or t
  modified_base (4931331)..(4931331): a, c, g or t
  modified_base (4933181)..(4933181): a, c, g or t
  modified_base (4934740)..(4934741): a, c, g or t
  modified_base (4935387)..(4935387): a, c, g or t
  modified_base (4936631)..(4936639): a, c, g or t
  modified_base (4936671)..(4936673): a, c, g or t
  modified_base (4936675)..(4936675): a, c, g or t
  modified_base (4937008)..(4937008): a, c, g or t
  modified_base (4937066)..(4937066): a, c, g or t
  modified_base (4937691)..(4937691): a, c, g or t
  modified_base (4940942)..(4940942): a, c, g or t
  modified_base (4944373)..(4944379): a, c, g or t
  modified_base (4951563)..(4951564): a, c, g or t
  modified_base (4953804)..(4953804): a, c, g or t
  modified_base (4954702)..(4954702): a, c, g or t
  modified_base (4966953)..(4966953): a, c, g or t
  modified_base (4967260)..(4967260): a, c, g or t
  modified_base (4967440)..(4967440): a, c, g or t
  modified_base (4967542)..(4967542): a, c, g or t
  modified_base (4967621)..(4967621): a, c, g or t
  modified_base (4967849)..(4967849): a, c, g or t
  modified_base (4968478)..(4968481): a, c, g or t
  modified_base (4969535)..(4969535): a, c, g or t
  modified_base (4973136)..(4973136): a, c, g or t
  modified_base (4973607)..(4973607): a, c, g or t
  modified_base (4973614)..(4973615): a, c, g or t
  modified_base (4974514)..(4974514): a, c, g or t
  modified_base (4974537)..(4974537): a, c, g or t
  modified_base (4974570)..(4974570): a, c, g or t
  modified_base (4974586)..(4974586): a, c, g or t
  modified_base (4975554)..(4975606): a, c, g or t
  modified_base (4976482)..(4976482): a, c, g or t
  modified_base (4976644)..(4976647): a, c, g or t
  modified_base (4976653)..(4976654): a, c, g or t
  modified_base (4979874)..(4979874): a, c, g or t
  modified_base (4985639)..(4985639): a, c, g or t
  modified_base (4987280)..(4987280): a, c, g or t
  modified_base (4987385)..(4987385): a, c, g or t
  modified_base (4987396)..(4987396): a, c, g or t
  modified_base (4988127)..(4988132): a, c, g or t
  modified_base (4989566)..(4989567): a, c, g or t
  modified_base (4991569)..(4991569): a, c, g or t
  modified_base (4993896)..(4993896): a, c, g or t
  modified_base (4993898)..(4993899): a, c, g or t
  modified_base (4995272)..(4995272): a, c, g or t
  modified_base (4996029)..(4996029): a, c, g or t
  modified_base (4999074)..(4999074): a, c, g or t
  modified_base (5002571)..(5002572): a, c, g or t
  modified_base (5002845)..(5002845): a, c, g or t
  modified_base (5004849)..(5004849): a, c, g or t
  modified_base (5005001)..(5005001): a, c, g or t
  modified_base (5005448)..(5005449): a, c, g or t
  modified_base (5005753)..(5005753): a, c, g or t
  modified_base (5006149)..(5006153): a, c, g or t
  modified_base (5007387)..(5007387): a, c, g or t
  modified_base (5009336)..(5009336): a, c, g or t
  modified_base (5010081)..(5010081): a, c, g or t
  modified_base (5010759)..(5010760): a, c, g or t
  modified_base (5010762)..(5010775): a, c, g or t
  modified_base (5011377)..(5011377): a, c, g or t
  modified_base (5022286)..(5022287): a, c, g or t
  modified_base (5022289)..(5022292): a, c, g or t
  modified_base (5026645)..(5026645): a, c, g or t
  modified_base (5028789)..(5028789): a, c, g or t
  modified_base (5029183)..(5029183): a, c, g or t
  modified_base (5031014)..(5031014): a, c, g or t
  modified_base (5031763)..(5031763): a, c, g or t
  modified_base (5033384)..(5033384): a, c, g or t
  modified_base (5033390)..(5033390): a, c, g or t
  modified_base (5042026)..(5042029): a, c, g or t
  modified_base (5042314)..(5042315): a, c, g or t
  modified_base (5047795)..(5047798): a, c, g or t
  modified_base (5047928)..(5047933): a, c, g or t
  modified_base (5050187)..(5050187): a, c, g or t
  modified_base (5050190)..(5050191): a, c, g or t
  modified_base (5050221)..(5050221): a, c, g or t
  modified_base (5050224)..(5050224): a, c, g or t
  modified_base (5050288)..(5050288): a, c, g or t
  modified_base (5051195)..(5051195): a, c, g or t
  modified_base (5051586)..(5051592): a, c, g or t
  modified_base (5051601)..(5051601): a, c, g or t
  modified_base (5051915)..(5051915): a, c, g or t
  modified_base (5053615)..(5053617): a, c, g or t
  modified_base (5053807)..(5053807): a, c, g or t
  modified_base (5057347)..(5057347): a, c, g or t
  modified_base (5057940)..(5057946): a, c, g or t
  modified_base (5058034)..(5058034): a, c, g or t
  modified_base (5060175)..(5060175): a, c, g or t
  modified_base (5060281)..(5060281): a, c, g or t
  modified_base (5060562)..(5060562): a, c, g or t
  modified_base (5060675)..(5060675): a, c, g or t
  modified_base (5063785)..(5063787): a, c, g or t
  modified_base (5068547)..(5068547): a, c, g or t
  modified_base (5068600)..(5068600): a, c, g or t
  modified_base (5068606)..(5068606): a, c, g or t
  modified_base (5068613)..(5068617): a, c, g or t
  modified_base (5071057)..(5071060): a, c, g or t
  modified_base (5071934)..(5071934): a, c, g or t
  modified_base (5072001)..(5072001): a, c, g or t
  modified_base (5072903)..(5072903): a, c, g or t
  modified_base (5073101)..(5073101): a, c, g or t
  modified_base (5074263)..(5074271): a, c, g or t
  modified_base (5075370)..(5075371): a, c, g or t
  modified_base (5075373)..(5075376): a, c, g or t
  modified_base (5075388)..(5075389): a, c, g or t
  modified_base (5075434)..(5075445): a, c, g or t
  modified_base (5075575)..(5075578): a, c, g or t
  modified_base (5075584)..(5075584): a, c, g or t
  modified_base (5075822)..(5075825): a, c, g or t
  modified_base (5075889)..(5075890): a, c, g or t
  modified_base (5076338)..(5076338): a, c, g or t
  modified_base (5076354)..(5076356): a, c, g or t
nnntgggcaacttatgggaatgcgatacaaaggctgggagtcaggctatgaggacgcatttgtctatgacctgggtgagtaccggctggtccttaagttttcacccggttttaaccactacaatgttgatagcaaagcgctaatgagcttccgttctcttcgagtgtaccgtgacaataaatccnnnncttttgccgaacttgatgtgtttgatttgagtgaggcgttaagcgcacctgacgtcattttccattnaaaacacagcgggcagtgatgcaactgcccgttattaacacgacttaccagcggggaaagcgatgatcgtgcaaaaagagctggttgctatttacgattatgaggtccctgtacctgaagatccgttttccttcagacttgagatccataaatgctctgaattatttacaggttccgtctatcgactggagcgattccggctacatccaacatttcatcaacgtgatcgagaagatgctgacccgctaataaatgatgcgttgatttatataagagatgagtgtattgatgagcggaaattacgaggtgaatcacctgaaactgtaatagcaatttttaatcgtgaactacagaatatattcaaccaagaaatagaataatatactctagataattcaagtcgcagcacatgcaacttgaaatatgacgagtatagctttattaaagggggaagcggttttcccccttagatgcgtttcaatttgcccgttacttcaacaaatcaatcaaccgtaacagagctactaatagctccagtacagcaatgagcacggttaacttttgtgtcagcgtgtccatccgctctccttattnnggagcgcaacaccagcaccttacccttacactgcctgtcgatactggtttacgtatgttggaccacgatgttgcactccggatcagggcaccacctgcagcacccccgtccggtagccaggacttgaaataggttcgatccggcgcaacgtcccaacagtcaggattataaatctcattatcttaattgcaacggggtccagccgtggttataattcgttcgttggaacacgatgttgcacaggctgtggtgttaggcctgaaaatagtaaataaaagaacctgcctcaccagcagttttttttatttactgtgatctgcttcccagatatttttcgctcaaacaactaatgcgccaaacatttattgcgcgtaaaatatcgtttatttcattaatacatttcagggatgaatatatgtcaccgcagaataatcatctgcagcgtccgcctgctgctgtgttatacgccgatgaactggcaaaattaaaacaaaatgataacgcaccttgcccgcccggttggcagttaagtttgcctgcggcccgtgcttttatccttggcgatagcgcncaaaatattagccgtaaagtggtgattagtccctccgctgtcgaacgtatgttagtcactcttgccaccggacgcggtttgatgttggtgggggaacctggcaccgcaaaatctctcctgtctgaattactggcaacctctattagcggcgatgccgggttaaccatccagggcggcgcatctactaccgaagatcaaatcaagtacggctggaactacgccctgcttatcaatcatggtccatcaacggaagcgctggtccctgccccgctttaccagggaatgcgcgacggcaaaatcgtccgttttgaagagataacgcgtacaccgctggaagtgcaagactgtctgttaggtatgctttctgacagggtgatgacggtgccggaactcactggtgaagccagtcagctctatgcgcgagaaggctttaatattattgccactgccaatacccnnnnncgcggcgtcaatgaaatgagtgctgcgctaaagcgtcgcttcgattttgaaactgtctttccgattatggatttcgcccaggagctggagcttgtcgccagtgcttcggcgcgtttgctggcccatagcggtattccgcataaagtgcctgacgcggtactggagttactggtccgcaccttccgcgatctgcgtgccaacggcgaaaagaaaacgtcaatggatacactaacagcgattatgtccaccgctgaagccgtgaacgtggcccacgctgtgggcgtccgcgcctggtttttagcgaatcgcgcgggggagcctgccgacctagtggactgtattgccggaaccatcgtcaaagataacgaagaagatcgcgctcgtctgcgccgttacttcgaacagcgtgtcgccacacataaagaagctcactggcaggcttattatcaagcccgccaccgcctgccgtgaggaaagatgcatgagcgagccgttaattgtcggcatccggcatcatagtccggcctgcgcccgactggtgaaatcgttaatcgaaagccagcgaccacgatacgtgttgattgaaggcccggctgattttaatgaccgggtagatgaactgtttttagcccaccagcttccggtggctatttacagttattgccagtatcaggacggtgctgctcctgggcgcnnnncctggacgccatttgccgaattttcgccggagtggcaggcgctacaagccgcacgtcatattcaggcacaaacttactttatcgatttgccttgctgggcgcagagtgaagaagaggacgattcgcctgatacgcaagaggaaagccaggccttgctgctgcgtgccacccgcatggataacagcgataccctgtgggatcacttgttcgaagatgaaagccagcaaactgcattaccctctgcactggcgcactattttgcccaactgcggggcgatttccccggcgatgcactcaatcgtcagcgcgaagcctttatggctcgctggattgcatgggcggtgcagcaaaataatggcgacgtgttagtcgtctgcggtggctggcacgctccggcactggcaaaaatgtggcgcgaatgcccgcaggacattaacaagccagaattgccctcgctggcagatgccgttacaggttgttatctcacaccctacagtgaaaagcgccttgatgtgctggcaggatacctttcaggaatgcctgccccggtctggcaaagctggtgctggcagtggggcttacagcaggcgggagaacaactgctaaaaacggttcttacccgtttgcgccaacaccacttgcctgcttcgaccgcggatatggctgccgctcatctgcatgcgatggcgctggcacagttgcgcggatataaactaccgttacgcactgactggctggatgccatagcaggctcgctgattaaagaagccctgaacgcgccgttgccgtggagctatcgcggcgttattcatcccgataccgatccgattctgctaacgttgatagacacattagcgggtgacggattcggtaaacttgcccnttctacgccacaaccgcctctgccaaaagatgtcacctgcgaactggaacgtaccgcaatctntctttcggcggagcttaccttaaatcgctttaaccccaatggactagcgcaaagtcaggtgttacatcggctggcaatactggagatcccagggattgtacgccagcagggaagcacactgacacttgcaggcaacggtgaagaacgctggaaattaacccgcccgcttagccagcatgcggcattgattgaggccgcctgctttggtgccacactccaggaagccgcacgccataaattagaagccgatatgctggacgcgggtggaatcggcagtatcaccacatgtcttagccaggcggcgttagcgggtctggcgtccttcagtcaacaattactggagcaactcacattattaatcgcccaggaaaatcaatttgccgaaatgggcccggcgctggaagtgctatatgccttatggcggctggatgaaattagcggtatgcaaggtgcgcagatatcacaaacgacgttatgcgcggctatcgatcgcacgctgtggctgtgtgaatctaacggcagaccggatgaaaaggagtttcacgctcacctgcatagctggcaagcgctttgccatattctgcgcgatctacatagcggcgttaatttacccggcgtttctctttctgcggcggtagccttactggagcgacgcagtcaggcaatccatgccccggcgctggatcgcggcgcggctcttggcgcactgatgcgtctggaacatcccaacgctagtgccgaagcggcgctgacgatgctggcgcagttatccccggcacaatccggcgaagcgctgcacggtttgctggcgctggcccgccatcaactggcctgtcagccggcatttatcgccggtttcagcagtcatttaaatcaactaagtgatgccgattttatcaatgccctgcccgatttacgcgcggcgatggcctggctaccgccacgagaacgcgggacgctggcgcatcaggtgcttgaacattatcaactggcgcaacttcccgtttcggcgctgcaaatgccgttgcattgcccaccacaagccattgcacatcatcaacaactcgaacagcaggcactggcatcgctgcaaaactggggagttttccatgtctgaactgaacgatcttctgaccacccgtgagctacaacgctggcgattaattcttggcgaagcggcagaaacgacgctttgtgggctggatgacaacgcccggcagatagaccacgcgctggagtggctgtatgggcgcgatcctgaacggctccagcgtggtgaacgctccagtggattaggtggctcaaatctcaccacccctgagtggatcaacagtattcacacgctgtttccgcaacaggtgattgagcggctggaaagcgatgccgtactgcgctacggcattgaagatgtggtgacgaatctcgacgtgctggaacgtatgcagccttctgaaagcctgctacgcgccgttttgcacaccaaacatctgatgaaccccgaagtactggctgccgcccgccggatagtgcgccaggttgttgaagaaattatggctcgactggcaaaggaagttcgtcaggctttttctggtgtccgcgatcgccgtcgccgctcatctattccactggcgcgagactttgatttcaaaagtactcttcgcgccaatctgcaacactggcacccgcaacacggcaagttgtatatcgaatccccccgctttaacagccgaattaagcgccacagtgaacaatggcaactggtcttactggttgatctaagcggatcgatggtcgattcggtgatccactctgcggtaatggcggcctgtttgtggcagttacccggcattcgtacccatctggtggcgtttgacaccagtgtcgttgatctcacggcagacgttgccgatccggtagagttattaatgaaagtacagttgggcggcgggaccaatatcgccagtgccgtggagtatgggcggcaacttattgaacaaccagcaaaaagcgtcattatcctcgtgagtgatttttatgaagggggttcatcatcattgctgacgcatcaggtgaaaaagtgtgtccagagcggcatcaaagtgctggggctggcagcgctcgacagcaccgcaacgccttgctatgaccgcgatatggcccaggcgctggttaatgttggcgcacaaatagccgcaatgacaccgggtgaactggctacctggcttgcggagaatttgcagtcatgaattcactacgtccggaattattagaactcacgccgcaggccctgacggcgttaagcaatgccggttttgttaagcgcagccttaaggaactggaaaatggcaacgtcccggaaatcagccatgagaacggcgctttaatcgccaccttcagtgacggtgtccgtacccagctggcgaacggccaggcactgaaagaggctcagtgcacctgcggggctagcggcatgtgccgtcatcgcgtgatgctggtgttaagttatcagcgactttgtgccaccacccggcccacggaaaaagaagaagagtggcagcctgcaatctggctggaagaactggctaccctgcccgatgccacccgcaaacgtgcacaggtgctggtcgctaaaggcatcaccattgagttgttctgtgcgcctggcgaaattccctcagcccgcttaccgatgagtgatgtgcgtttttattcccgcagcagcattcgcttcgcccgctgtgattgtattgaaggcacactttgcgaacatgtcgtactggctgtgcaggccttcgtcgaggccaaaactcagcaagcggaatttactcatttaatctggcagatgcgcagcgaacacgtcacatcatctgacgacccgtttgccagcgaagaaggcaacgcgtgtcgtcaatatgttcagcaattaagccaggcattatggcttggcggcatcagccagccgcttattcactacgaggccgctttcagccgcnnnnagcaagcggcggaacgctgcaactggcgctgggtgagtgaatcgctacggcaactgcgcgccagcgttgatgccttccacgcccgcgccagccactatcatgcaggagaatgcttacgtcagcttgcggcattaaacagtcgattaaattgcgcacaagagatggcccggcgcgacagtgttggtgaagttcctcctgtgccgtggcgcacggtcgttggctctggcattgccggagaagcaaagcttgatcatctgcggctggtgtctttaggtatgcgttgctggcaggatattgagcattatggtttacgcatctggtttaccgatcccgacaccggcagtattttgcacctttcgcgcagttggccgcgaagtgaacaggaaaactcaccggcagctacgcgtcggctgtttagttttcaggctggcgcactggcgggtgggcaaattgtttcacaagcagcaaaacgcagtgccgatggcgagctgctgttagctacccgcaaccgctnnnncagcgttgtgccgctgtcgcctgatgcctggcgaatgttgagcgcgccgttacgccagccgggcattgtggctttgcgggaatatttacgccagcgtcccccctcctgcatacggcctcttaatcaggtcgataacttatttattctgccggtcgctgagtgtatttcgctcggttgggatagcagccgccagacgctggatgcgcaggtaatcagcggcgaaggtgaagataatctgctgacgttatcactgccagcctcagccagcgcgccttatgccgttgaacgcatggcggcgcttttgcaacaaacagacgaccccgtgtgtctggtttctggctttgtcagttttgttgatgggcaattgacactggaaccacaggtaatgatgacaaagactcgtgcctgggcgctggacgcagaaactgcgcctgtggtggcatcactaccttctgccagcgttctgcctgtgccgtctactgctcatcagttgctgatgcgctgccaggcattacttattcaactgctccataacggctggcgctatcaggaacagagtgctattggtcaggcagagttgctggcgaatgacctcaccncggtgggtttttatcggctggcacatgtattgggacaatttcgtaatacagaaagcgaggcacgggtagaagnngtagaagcaatgaataacggtgttttgctgtgcgaacaattattccccctgcttcagcaacaaggatgaaatagtgctttttactaagagttctactccagttccggactgctcacgccacggtattaggcatatcctatatagcccctggtgagagtcaccagttccttgattaaataaaatggagttttacatgaaggctttcaataagctgttttcccttgttgttgcatctgttctggttttttctcttgctggctgcggtgacaaagaagaatcgaagaaattcagcgccaatctgaacggcactgaaattgccattacctatgtctacaaaggtgacaaggtgcttaagcaatcttctgaaaccaaaattcaatttgcctccattggtgctaccaccaaagaagatgctgccaagacacttgagccgttaagcgccaaatacaaaaacatcgcgggtgttgaagaaaaattaacctataccgatacctacgcgcaggaaaacgtgactatcgatatggaaaaagtggattttaaagccctgcagggtatttcaggaatcaacatttctgctgaagatgccaaaaaaggtatcactatggcgcaaatggaactggtgatgaaagccgctggttttaaagaagtgaaataatctgtcggcggccatgtttgcgcatggccgccatacccgtcttagcttttcttcacatgctggcgcgctgccagtccacgcagaaaataacgtaaaaattgatcgccgcattcgcggaagtttttatgatccggtgcacgcatcatcgccgtaatttccggcatcgaaacgcggaactgctgttcggtgaggatcgccagaatgtcatcggttttcagcgaaaacgcgatgcgtaattttttcagcacgatgttgttattaatgcgacgttccggctccagtgccggagcagactcatccttgccgcgtttttcataaatcaggccattgaggaatgacgacaaaacaatgtccggacaacgctgaaaaccctcttcgtcttctttacgtagccagacggcgatctgttccgcggtggcttcgacattacccagcgccagtatacgcaccaggtcattattattggctttcaaaatgtagcgcacgctgcgcagaatatcgttacttagcatgaggccttcaggtgttgatgaggcaaaaagccattttagcagtcttttacaggccaatcgcctcttttaagcttttcagataacggcggctgaccggcacggttaagccattacgcaaaatcaactcggcctgaccgttatcttccagacgaatctcctgtaaatgcgcgaggttaaccagatactgacgatggcagcgcagtagtggtgtacgactttccagggtacgtaatgtcaattcggtaaagccctctttcccttcgtggctggtaacgtagacaccgctcatccgactgctgacaaatgccacatctttcatttgcagcaaataaatccgactatgccccgtacaagggataaatttcagcgcctgttgattttccggtaacagcgaaacatcctgcttgctgcgctcctgacgcaatcgcgccagcgttttctccagtcgcgcttcatcaattggcttcagcagatagtcaaaggcatgttcttcaaaggctttaatagcgtattcgtcaaacgcggtgagaaaaacaatatacggacgatgttccgggtcgagcatccccaccatttccagaccactgatgcgcggcatctggatatcgagaaacagcacatccgggcgcagtttatgcaccgcgccgatcccttccacggcgtttgaacactcaccaacgatttcaatatcgctctgctcctgcaaaaatacgcgcaggttctcccgtgctaacggttcatcatcgacaattaagactttaatcatgcctcgtccctccatggtagtcgtaacgttattcgtgtgtaactatcaggctcacaggcgacgcttatcccatagtcatcgccaaaccgttcacgtaaacgcttatccaccagattcatccccagcccactggcattggttaccggttgatacaaaccggcattgtcttcgatctccagcatcaaatgttgcccctcacgtcgggcgctgattgccactcgccctgtatccagcagttgtgatgtcccatgtttaatggcgttttccactatcggttgcagggtaaacgcgggcaattgctgctgggataattnnnncggaatagcaatgttgacctgcaaccgcgactggnnnngcgccttttcaatttgcagataagcattcacatgttcaatttcgtcggcgagagtaacaaactccgaaggccgctttaagtttttgcggaaaaaagtggaaagatactgcaccagctggctggcctgttcgctgtcgcgacggatcaccgctttaatggtgttaagcgcattaaacaaaaaatgggggttcacctgggcgtgaagcagtttgatctctgactgggtgagcatcgctttttgccgctcatattgcccggcgaggatctgcgccgaaagcagttgcgcaatcccctcgcccagcgtgcggttgattgaactaaataaacggtttttggcttcatacaatttgatggtgcnnatcacccgctgattttcaccacgcaacggaattaccagcgtcgaccccagtttgcattgcggatgcaaagagcaacgataaggtacttcgttgccatcagcgtagaccacttcaccggtttcaatcgcttttaaagtataagttgaagaaatcggtttgccgggtaaatggtggtcgtcaccaattccggtaaaggccagcaatttctctcgatcggtaatcgcgactgcaccaatatccagctccagatacagcacctgagccactttcatgctgttcacttcgttaaacccctggcgcaaaatgccttccgtcgaggctgccactttcagcgcagtggcagaaanagccgaagtgtatttttcaaacatcncgcgtttatcgagcaatatacnnnnnnnnnnnnnnnnnnnnacggtattggtgaccatcattggcgcagcaatattactcaccagacgcaccgcatcttcataaggtcgggcgatcgccaggatgatcagcatttgcaccatttcagcgacgaacgtgacggcaccagcggtaatggggttaaagactttatcagtgcgcccgcgacggatcaggatgctgtgtaccaggccgccgagcaatccttcaacgatggtcgagatcatgcaacttagcgcggtcatgccccccatcgaatatcgatgtaacccgccggtcaggccaaccagcccaccgacgaccggaccgccgagtaagccgcccattaccgcgcctatcgcacgggtattggcaatagaatcgtcaatgtgcaacccaaaccaggtgcccatgatgcagaagatggaaaagacgatgtagcagagaaatttatgcggcagacgaaccgtgacctgcattaacggtatgaatnnnngcgttttactcattaaccacgcaatgactaaaaaaacgcacatctgctgaagcagcagcaacaccagattaaaatcgtacatacccgcaaaccacacttccctttaaaacgcgtaacatacattgcctgcgtttaactttctttgaactcttgcagaaaaatgagaattcgtgagtacgatcactcaaaatcgcctggcaaaaanaaaatcaccctataaatgcacaaaaaacgggcaaaactacctggttcgcaaaactgcgtctaaagttaaaccgggacctcgcgagcaagggtgagacgatggcgctttacacaattggtgaagtggcgttgctttgtgatattaaccctgtcacgttacgnnnnnnnnnnnnnnnnnnnnnnnnnnnnnnnnnnnnnnnnnnnnnacgaagagcgtccaggagcgccgtttttcaagggttggatagatgattcgtttaccatgtcgacgaacttcgacgaatttcgccgataaaaagtgtccnnnnnntnnnnnnnnnnnnnnnnnnnnnnnnnnnnnnnnnnnnnnnnnnnnnnnnnaatattttcccacgtcccgtcagcacgcaggatttgcagcggtcttaccacncactgtatctgctttttatcygcatccagtatcaccacctgngtgattaccctgtcctgctccggaataatnccattctcatctgactccaggatgtctgccggccccagtcgcagttgtnctgtaagcgactgcccgtgttcacggncatcatgctttccgcaaccacacagacgctncataagtttttttagtatattcatgtcattctcctgttctgcctgtatcactgcccacttcatccagncccttaacatcctgccacggcccgtcnccaaacctgacctgcaaatgctgaaacancccctgaacctgtgtggcatctttggggtcaagaaaggtcagtccggtgatgagtgcgccatctgtatccgggaaccagccattgctgtttgtctcaataatnnnnnnnnnccccagacgaaaacggatttgtgtctcccccgggtcgcccttcggtccctgaggtccggttgcccccaccgggcnngccgcacctgtttctcctttcggtccctgtgggcctgccgggcctgccgcaccggtatctccctttggaccctgtggacctgcatttcccgtcagaccggtctctccccgctctcccctgtcacctttcggcccctgcgggcctgccggaccagcatcacctgccggtccccgttcncnnnnnnnnnnnnnnnnnnnnntgtcaccgcgctctcccttatcacccttcgnnccnnnnnnnnnnnnnnnnnnnnnnnnnnnnnnnnnnnnnnnnncgggaggtcccaccacggtggggattcggtttacggcctcttccgccgctatcctgctttgttccgctgactgtgcgcnnnntnnnnantcccgggctttttctgttgcggtcgttgcatccctnnnnnnnnnnnnnnnnnnnnnnnnnnnnnnnnnnnnnnnnnnnnnacaattcagcttctgctgcactttgtgatgactcactggctttttgagcnnncgcagaagccgaggacgaggacgcatcctctgactgctttgcnnnngctgcactttctgccgcctgccggnntgactccgatgcntcccctgctgaagtgtcagcatttgcngcgctctcttctgcctgactggctgatatgccggcattcctcgcngacgtctccgcctctccggcattcttcttnnnnnnnnnnnnnnnnnnnnnnnnnnnnnnnnnnnnnnnnnnnnnnnnnnnnttccaccatcagttcaaaacgacgcagtgcctcnnnnnnnnnnnnnnnnnnnnnnnnnnnnnnnnnnnnnnnnnnnncnnnatggcaccgagaaaatcattcagnntnnncggttgagaatcttcatacacggtgatggtccnnnnnnnnnnnnnnnnnnnnnnnnnnnnnnnnnnnnnnnnnnnnnnnnnnnnnnnntgtactgaccgtactcaacgtccatgctgtaacgaccggcttcatnnggnnnttcagaggccaccgtgttcaccaccaccgnnnnnnnnntacgtnnngctttcagttgaatggtgnngttctctaccggttttcctgtgccgtctttcagtacacctgaaatctttactnncatannnnnnnnnnnnnnnnnnnnnnnnnnnnnngnnggctgtcataacactgtgttacctnnnnnnnnnnnnnnnnnnnnnnnnnnnnnnnnnnnnnnnnnnnnnnnnnnnnnnnnnnnnnnnnnnnnnnnnnnnnnnnnnnnnnnnnnnagcaatatcaatggcnacggattcggtcgggttaaactgcannnnnnnnnnnnnnnccagagacgtgttgctgtggcgancgnnatcacttccggtcagcanntcgtgcgttttccccttgttgtcagttacgcggagataatccccggagaaagnngnnacnnnnctgtaagccactcccgccnnnnnnnnnnnnnnnnnnnnnncattcacgcgcacagacggccccgnnnnnnngcnnaaccagcggttacgcannnnnnnnncatgccagcgggtatcgctgtaacgggtaatctggcgattcctgtctcctgcatagctgaatgacgtcaccagccccagcgtgtccgtgaattcataacggtatttcacgttaatcccgttaanattatcgctaccgggagcgttcgtcgagncatgaagataccccgcgctcagcgtggcctgctgctcagacgcccatgcaggcncaccggatacggncagacaaatggctgcggacaaaatggcggcatanngttnncgcnnannnnnnnnnnnnnnnnnnnnnnnnnnnnnnnnnnnnnnnnnnnnnnnnnnnnnnngggttataaatatttcaacgaatactgatgccggaagcngctnttttggtcacaatcaccgtacnnncggtgatattgcctgccccctgattgcctttctggnaaatcttaaactccagantgacgctaccaccaccactagncatatcaataactgcactgtaactaccgggaatggcccctttagtttctctggatgcgattaatacnccgtttttgcgaacttcaaaaccataacccgtgtatcgcgtgcctcctgggttatttccgctccccggatcgtcatacgctataccgttaaanataatgggcggaataataatctggcggtcaaagttatgatcatcnctgatggtgactgtaaccgtnccgtttggtgtttccgtgttaccccacgtaccgacttttttcgggaaggcttttgatacagctttaacgaaatcccctctgacctgggtcgcctccagcatgcccttaatcgtacagttctggttaatcgtgacattgttgagcgctcctgagttcgcattcacactgccactgatatccgcatttttcgccgtcagtcgcccgtctggtgtcagggaaaatgccggnggatnnncgccgctggtaatggtgggagccgtcagatatttcaggaacacttcattcatgaatatctgatcgccctgaccaacaaacatcggctttgtgttgccattcgcaggattaatcatcgcaatcctgtctgcnnnnnncagnnnnnnnnnnnnnnnnnnnnnnnnnnnnnnnnnnnnnnnnnnnnnnnntaccggcaccgatacccgcaatataaaggcgtccgtccttnnnntgntgcagcttcacagcccacatgctgttcagattattatttgtatcaacctgaaccttctgtatctgctggatcgctgcactctggtcttccagtttcttattgacggtcnnnnnnnnnnnnnnnnnnnnnnnnnnnnnnnnnnnnnnnnnnnnnnnnnnnnnnnnnnnnnnnnnnnnnnnnnnnnnnnnnnnnnnnnnnnnnnnnnnnnnnnnnagccagatgggttttccctatctngcctttgaaaaaatccagatagccngatgcatcatnnnnnnnnnnnnnnnnnnnnnnnnnnnnnnnnnnnnnnnatgccgatttgccaacggtgttcacactgcggatataaaagtaataatcatggcccggtttgatattgatacnnnnnnnnnnccagtanngccccgtgccaaggtagcgggctgtggtttcaacctgcctgatannnnnnnnnnnnnnnnnnnnnnnnnnnnnnnnnnnnnnnnnnnnnnagaactcaaactgtaccgtcggatcataaaccgcaagatgcggcgtggcngttatctgaaaatagcccgnnnncagctcaatnnnnnacggcgctgccggtgcggcaatccggaacgataccgatgccggatcgccctgctgtccccacgcatttaccgcccggactgtcancctgnngttccccggcgccagttgcgtgaagcggtatgtggtttnnnncgtcnnnnnnnnnnnnnnnnnncgctcactgccgtcatccgctgccacggtcaggcgaagcaggaagctcacgcccttcaccaccttcggcgtgtcccnnngcgccagcacctgatattccccgctgtctgcggtgacttctgcggtcaggtgctgcaccgctggcggcgtgacaccattcaccgtgcngctctgnnnnnnnnnnnnnnnnnnnncgttatccacgatggcttctttctccggcacatgctgcactgccgtgatggcaaaggnnnnnnnnnnnnnnnnnnnnnnnnnnnnnnnnnnnnnnaggcgacgacgcagtgacggcagggagagtccccatacaccgtatgtctccacaccatcaggcagggtgctgacctgtatccggtccggcgcgnnnnnnncagnnatggccacgctcaccggcttaccgctgccgttaatcaggttcaccgtggcggcacctgtctccggcagggtcacctcacggtccagngtcannntgcggctggcggcatcgatggacaggatacgtccgccggtcatggtcccggcatagtcgttatcacagatttcaataatgtcaccgggtgtgtgacgcagcccctgtgacccgagcgtgaaatccaccgtctgcgtttccagcagtccggtctttatcacccacagcccggcacggtgggcctgacnncgactggtgcanccgaacgcatccatcttcagcaggttgcgcccgtanngcagtannnnnnnnnnnnnnnnnnnnnnnnncgtggaggtctnncagccgttctnnnnnnnnnnnnnattcacctccaccgcnntgtggcggtccttcagggcgctgaagctnnngngaaaccccacgncgttatcatccaccaccacatcgcagttggtgtacggccacaccacatccgacgggcggtcctgaacgaacgtcagcgtctgnccgttccataccggcatacagcgcatcgccgagcagaaatcactgagaacgtcccacgccttacgctgttgtgacaggtacgcattnaargtcatccgcggctctgtgcccccgaaaccatccgggaccgtctggtcgcagtannnnnnnntggcatacagcgcccatttgtccacntcngccgcccccagacgttttcccatgccgtagcgcgggtgagtcagcatgtcccacaggcaccaggccgggttgttgctgtatgccggtttcaggctgccgtcccagatnccgctgtangtgcgtttttccgggtcatagtttgacggtacctgratgatgcgaccgcggatatggtagttcaccgtcatctgctgrccrccaaactgctccgcatccacctgcagccccacaatcgccgtgttcgggtagcactgtttcacatcgatgatttcggtgtatgacgaccagagcgtcttattctgcagctggtccgrggtgctgtccgctgtctccnnnnccatccnnnnnnnnnnnnnnnnnnnnnnnnnnnnnnnnnnnnnnnnnnnnagggccggggaggcagattatccagaatcaccgacgccaggaactgygaggtggtcttgccgttaatggtgacatccttttcnnnnnnnnnnnnnnnnnnnnnnnnnnnnnnnnnnnnnnnnnnnnntcagcaggcggacggatgtcgggttncggtcaccctttgacgtggtctncaccagtgnctgcacnccgaaggtgacccgcaggcggtcaatgttcgcggatgtaatggtgcgcgtcaccggctttgccttcgtcacttccacgcccagtgcggtttcagctccggakgactcaaagccttcnggnggtgtctgctcctgctccccgnnnnnnnnnnnnnnnnnnnnnnnnnnnnnnnnnnnnnnnnnnnncngtgtccgtcagcggggttttgttcaccagnatactctgcagccccttcnnnnnnnnnnnnnnnnnnnnnnnnnnnnnnnnnnnnnnnnnngccgccacctttacccataatgttcctctcaattggtattattaatcgcagtgataggatattgcacagctattgcgcgatatcannngaacgctgtttgttaccctgtaaccagcaagctcagtctgttaacggaattaatgagggttttatgaaatgtaaaatcattgctgccattgccatgctgacagcagcatcatgcggatacgcagcagaacaggaagtcccaatgaaccttgtcagtgcnnnnnnnaaagaagtcagcattggaaaaataaccattcaggagaccccctacggtctgctgttcacaccagcccttcactctctgtctgaaggcattcatggttttcatgtgnacnnnnnnnnnnnnnnnnnnnnnnnnnnnnnnnnnnnnnnnnnnnnnnnnnnnnnnnnnnnnnnnnnnnnnnnnnnnnnnnnnnnnnnnnnnnnnnnnnnnaaacaccggcaaacatcttggcccctggtctccggatggacacctgggcgacctccctgcgctgttcgtgacgcatgacggaaaagcgaactacccggtcctggccccgagactgaactcattaaaagagannnaagggcgttctctcatgcttcatgctggcggtgataaccatcatgaccatccggagcccctgggcggtggtggtgcgagaatggcctgcggcatcattcaataatcagtcaggtaaggggcgggccccttacctttattcctcaggacgataaatcctttctccctgaaaagaacggcacatcctccctctctgngttaatgtttttgtcgtgacataagaataattccttacactcaatcttcgtaacnctcccgcagntcctgtccgtgagcactgcgggatnnnnnnnnnnnnnnnnnnnnnnnnnnnnnnnnnnnnnnnnnnnnnnnnnnnnnnnnnnnnnnnnnttcatcacgggtgctgatgtcctgggnnnnnnnnnnnnnnnnnnnnnnnnnnnnnnnnnnnnnnnnnnnnnnnnnnnnnnatttcnccgtaaggcnncggcatcgggnnaccctgngcaatcatnttnnccagtgnnnnnnnnnacgtgttctgtyyaccgttatccgttgcnnnnnnnnnnnnnnnnnnnnnnnnnnnnnnnnnnnnnnnnnnnnngggcaagcatctgagccacaccacccagtatcatgctggcccccagtgaaaacagcatcgtggtgnnnnnnnnnnnnnnnnnnnnnnnnnnnnnnnnnnnnnnnnnnnnnnnnnnnnnnnnnnnnnnnnnnnnnnnnnnnnnnnnnnnnnnnnnnnnnnnnnnnnnnnnnnnggnnagtcgcggcacaatgtggatgaccgttccctcacccagctgttcgtgaagacgggcgtacaccgcctccggtgccgtgtcntcaccggcaatanntatnnggtaccannnnnnnnnnnnnnnnnnnnnnnnnnnnnnnnnnnnnnnnnnnnnnnnnnnnnnnnnnnnnnnnnnnggcttccgctgccgtgttcacatacaggctgaggcggcggccaaatcgttgtaaatccccgtgaaggcagatgcgtnncagtggcggtgacgccaggctgaatgcgttcgtcgttgccatttttcggaatacctctcccgtttactcagttgttcaggcagatggtgaagnnnnnnnnnnnnnnnnnnnnnnnnnnnnnnnnnnnnnnnnnnnnnnnnnnnnnnnnnnnnnnnnnnnnnnnnnnnnnnnnnnnnnnnnnnnnnnnnnnnnnnnnnnnnnnnnnnnnnnnnnnnnnnnnnnnnnnnnggttctgaccgttncgccaccagtcatccnnnnnnnnnnnnnnnnnnnnntcaattcccgccagatggtaggcatcccggaacagcgtgtaacagtccgtcaccnnnnnnncanagcgccgtcctgtcagatgtgnnacacagcggaatttatgaatttccccccggcagaccagccaccagnacagtgcactttttntctgcagccgccggtcgnnctcgctcagccagggcagaccaccgggatgactgtggaccagtgccacaatctcnccctgcatctctgcccgcagccagtcttccggtgcaatacgaaaannnnnnnnnnnnnnnnnnnnnnnnnnnnnnnnnnnnnnnnnnagagatattcacacaagggatataccgntccccctnnnnnnnnnnnnnnncgaagccgcacgactccgctggcgcacaccgccgggcatgcgccagaatcgcnnnnnnnnnnnnnnnnnnnnnnnnnnnnnnnnnnnnnnnnnnaacaggatttantgcgaaagtttattgatggaaaggaaaccgccaaaattgaccgccatgccgcgcatctcacacccgcgcatgcnnntnctgcatctgtccttncggatatccgtggtggggttgtcgaactcatccgccnnnnnnnnnnnnnnnnnnnnnnnnnnnnnnnnnnnnnnnnnnnacaggtgttcgccagcatgatgcgaccnggaaacagcgccccgtccgtctcsgtcggtgtcgccagcacaaacgaggccgtnnnnnnnnnnnnnnnnnnnnnnnnnnnnnnnnnnnnnnnnnnnnnnnnnnnnccgcatccagaaaacgggcatacacccggcggcggaccaccgtnncccnnncnnnnnnnnnnnnnnnnnnnnnnnnnnnnnnnnnnnnnnnnnnnnnntnnacaccgtcagngacgggnnnnnnnnnnnnnnnnnnnnnnnnnnnnnnnnnnnnnnnagccactgccgtcaatcgggtatgcctgatattgccgcccctgccnnnnnnnnnnnnnnnnnnnnnnnnnnnnnnnnnnnnnnnnngctcattrcagaaaaaataccgctcaccrccctgyaccgtcaggtcratttcccagagyaccacccgcggtgactgctctgatttaaccgactcgttcagnctttcttcnnnnnnnnnnnnnnnnnnnnnnnnnnnnnnnnnnnnnnnnnnnngttcaccacctgctcaatcgtacancnnnnnnnnnnnnnnnnnnnnnnnnnnnnnnnnnnnnnnnnnntccgtgacgctccactcccggcacaccaccctcaccgtccggttatgnnnnnnnnnnnnnnnnnnnnnnnnnnnnnnnnnnnnnnnngtcacccggaacaccgcctgaaacgtcttcagttgaggattcagccctgnggggcggcgctgttcataaccgtcaccaaaccgcaccctcannnncgacggcttctcactcacctgcatcccttcacgcgggaccagatgcagcgtttttatctcagccactcagcattcctccgtcacgtcgcatggacagcatcaccgcctgcacccgctggtcaatcagctgcacaagactgcctgccgcctcnnnnnctnnnnnnnnnnnnnnnnnnnnnnnnnnnnnnnnnnnnnntntggtagaccggggaatacaccagaccngcactgccgttcatactgccnnnnnnnnnnnnnnnnnnnnnnnnnnnnnnnnnnnnnnnnnncaggggcataatggcttcaggtccgnnnncccccnnnnnnnnnnnnnnnnnnnnnnnnnnnnnnnnnnnnnnnnnnnnnnnnnnnnnnnnnnncgcgctcaggtttgccgaggtatacacgcnnncttnnnnnnnnnnnnnnnnnnnnnnnnnnnnnnnnnnnnnnnnnnnngccagtcaccaatgctgccaagaaatcctcctgcaccggacataccgtttgccgccnnnnnnnnnnnnnnnnnnnnnnnnnnnnnnnnnnnnnnnnnngaacttttgatatttcctgcnnnnnnnnnnnnnnnnnnnnnnnnnnnnnnnnnnnnnnnnagcatctccgtgatgttattcaccatccctgagataccctccgtcgcnagctgtgctgcctgtgaggcgtaatcggacgcattatccacccagttactgaatccctcctgcagccctttctgccagtccgcacgctgcncatccgatnnnnnnnnnnnnnnnnnnnnnnnnnnnnnnnnnnnnnnnngtctgtaaaaatcctcactgttatccccggtctgatactgagactgaaggtccgcatccttctggcggaagctgtcgcggatctgctgcaactcccgcatgcgttctctggctcgttccccctgcccgtaccccagcagttcagcatcattcgacgcacgcgcagccgcattctcattcttcagtgtctcttcccgggatcgcaactgttcccggattttttnntnntnnnnnnnnnnnnnnnnnnnnnnnnnnnnnnnnnnnnnnnnnnnnnnnnnnnnnatctccgtcagggttttcagttnnnnnnnnnnnnnnnnnnnnnnnnnnnnnnnnnnnnnnnnnntanttcagcttcgccagctctgtatactgannnnnnnnnnnnnnnnnnnnnnnnnnnnnnnnnnnnnnnnnnnnnttcagcagccgggaaaaactgtcttccgctttttccgtctctgattttccaccccgggnnnnnnnnnnnnnnnnnnnnnnnnnnnnnnnnnnnnnnnnnnccgcatatcccagccggacacgctctttttcttcccctttcagtctggacagggccagctcacgctctgtttttgtcagggcactctgctgtttatcatccagggtggcctgtggcagccgtaacggcacattcacnnnnnntgccgctgctgaagcagttcattccccagccccagcagacggttaaattccgtatgctgaacattcatctgcagcaatgcctggtatgctctgttctgctctgctgcctcctcgcgtatcctcgccacacggttgtattccagtgacgccagagcttcctgtacagacttcgccttttcctgcatctgtgtcagtcgtgactgttcaaccgccagtttgccagttgcctccgcaaggccatgggttataatctccacacctgaaccaccctgtggattttcctgcagccagcgctgatagtcagcaatctgtgttttcagtccccggactttactttcctgctcagcaatcagacgattctgctcttccagtgcctcgcgagttttaccctcattatcagccagttccggaagggtcattcccggtacctttgcccggatttcatcaatcgtcgatgcatactgacgggcggactccctggcctgttcctgattctggtacaccgtgtaccaggcaccggctcccagcatcagtaaaccggatatcccgccgacaagcgaaagcagggatgccgcgccacttttcagcattcccgtaaccgacgtggcattctccagcgccttcctcgaggccgccaccgcctgattcgactgtaccagtgcggcattggccacaatcatggcccggcgttttgcgacggcattctgtgtggccagcgcctccgcactgctatttctggccagtgcaagttcagcctgtgccagttgccaggcacgttctgccgccagcgcgtcagctgccgccttacgctgcacctgaacagccgcatctgcctgtgcggctgcaagggcaaccgtcccggacttcgccgcgatcagctctgtggtgacctttcccacgcctgcggccatattgccaaagtaccgggccaccccgnnggcaaccagcgcccccgcggctgttgccacattatcaatctgtccggcaacaccgttcagcacgccggagagcgttttcgtcgctccgctggcttcattcgcgccacccacccaggccataaaggcgttttccacctttgtgatcccgtcagagaccgtttccggcatggcggcatattcatcacgcaatacccccagctggctgattaacgcaggaacgactttatccgccgtcagtttgccgtcgtccgccatcgccttaaggtctttacgggccacgcccatacccgcagccagtgcacgtatgatccggtctccgctttcattgaccgaattaaattcctcaccccgtaacacaccctgtgccagcgcctggctgaactgggtgatcnnnnannccgcctctnncgtnntggcaccggatattttcagccctgtcgaaatggcctccgtcaccttcagtacatcaccggcactgtaaccatattcacgcatcgaggcagccgaacgggcaaacagggccgcattatccgaaaatgccgtgcctgtccgctggctgatatccatcagcactttctgtgatgacgnaaatnnnnnnnnnnnnnnnnnnnnnnnnnnnnnnnnnnnnnnnngcctgtttcagacgggcattcacggaactccactcatcagccagtgaaatcaggtgtccggtggcaaaggcaccggcaaatgcgccagccattccgacagcagaaccgcgaatttccgtcaactggctgttcagttctgccagggcacgtcgctgctcccgggctgccgcagcggcctgacgcccgccattctgcagggtccggtaatattcactgcccatacgggacgcccgctggatctccgactggaatgactgtgaatttgccgaaattttgataatcagttcacgtaacgtcgccattcacctttctccgggcaaaaaaaacctgccacagcaggttttcatcattatttatgacattgctgcaaggctcagcgcgtcttccagcgccgcaaacggatccacctccggcttatcctcatcctcgccccagcagagcatggcgtccttcagtgcaacattcatcccctgtgccccgaaaaccgctttcacgatctgtgcattacggatatccccgcgctcatcacccagcggggataccctgtcgaactccatccacatcatcgcctcgctcgcactcaggctgtgccgcagttcggataaggtgcgccccagacggagcgcaagtcgcatcagaaagcnntccgggcgggctacttttttctggccgactctgcatcagcgatcagttccagtgcctgacgcagcaaccgggcatgtaccggaccatagacggccagcacctgctcacggtcgtccggnnnnnnnnnnnnnnnnnnnnnnnnnnnnnnnnnnnnnnnncaggacatcgcagaacagcgtcacatccgcttccaggttacggcgggttttcgccaccaccgacagggtatcgtcatcctctccatcaccattgagcacttcctgccacagataccaggcctctgccgaaggctcccgcagcaccacgctgacatttctccattccggnnnnnnnnnnnnnnnnnnnnnnnnnnnnnnnnnnnnnnnnnnnnnnncccgacagtctggccagcgccagtgttttcagatcttttgccataagccttatccgcccgcaccattaaccgttnnnnnacacgcatcagaggtaatgctctgcggctgttctgnnnnnnnnnnnnnnnnnnnnnnnnnnnnnnnnnnnnnnnnnntactgaaagtgtcagtagtnnnnnnnnnnnnnnnnnnnnnnnnnnnnnnnnnnnnnnnnnccccgttgacactgactgacattgtcagcagcgcaccggtattcanggtaagnnnnnnnnnnnnnnnnnnnnnnnnnnnnnnnnnnnnnnnnnacanaggacaccggtttacccttcaggcnnnnnnnnnnnnnnnnnnnnnnnnnnnnnnnnnnnnnnnncacgccgttggtaccggatgaccaggtgtgnnnnnnnnnnnnnnnnnnnnnnnnnnnnnnnnnnnnnnnngcccttaccggacggaaactgcaccttaaacgcatacaccgtgtcattgtcataggcatcacgcagggcgttctgggcctgattcagataaaaattacccgacatggaaatctcggnnnncgcccccagaccgttgatgttctcctgctctgtggagcagagcgtggtcacatcaatatcctgtttctgaccggcggtgaactggacttccttgatggtgcagtccaggcgcagatattcnnnnnnnnncannnnttcagcagtcgccggggcagatgaaatcatcacctgcgtcagctgtgagcnnnnatacaaannnnnnnnnnnnnnnnnnnnnnnnnnnnnnnnnnnnnnnnnnnnnnnnnnnnnnnnnnnnnnnnnngacctgaaactccagggttgcacggtaacagcggttttccggaatatagtcctgcatttcactgacggatcccggggccagcagcattatggcttcacgggcgtcctgacgtatctgacgcgcnnnnnnnnnnnnnnnnnnnnnnnnnnnnnnnnnnnnnnnnctgcaccgacactgaggactcnnnnnnnnnnnnnnnnnnnnnnnnnnnnnnnnnnnnnnnnnnnnnnnnnngcgccaccgacggcctgccatccagcaggnnnnccacatacgggtacacctgcccgccggcaagatgcnncagnnnnnnnnnnaaatccacctccgtcatcgtctcagtatctcatcaatggcccggnnnnnnnnnnnnnnnnnnnnnnnnnnnnnnnnnnnnnnnnnnnnnnnnnnngtggcatattcacggtccccatttccacaaacnnnnnnnnnnnnnnnnnnnnnnnnnnnnnnnnnnnnnnnnnnatccgccttcatggtgttatcgctgttaccggtgtccggattaacnnnnnnnnnnnnnnnnnnnnnnnnnnnnnnnnnnnnnnnnnnagcgcnnngaaaggaccaccacanngcggcgcagttttcccctgcgtaccggtgcccgtgacaccacttcttctttcagcacattcgcacccgcacgggttgcctcacgcagcacccggttatttnnnnnnnnnnnnnnnnnnnnnnnnnnnnnnnnnnnnnnnnnnnnnnnnnnnnnnnnnnntgtcctccagccccgaaaaatccagcagggtttcgatcatttttcccctcccagccgacagagaatnnnnnnnnnnnnnnnnnnnnnnnnnnnnnnnnnnnnnnnnnnnnnnnnncnntcagcacatgaagtcgtgnnnnnnnnnnnnnnnnnnnnnnnnnnnnnnnnnnnnnnnnnnnnnnnnnnnnnnnnnnnnnnnnnnngccatttccgcaccggactgcatccgctcccggctgctcctnncccggatatccgcatgaattttcccgcatgacncccattcttctgtcatttctccggcagnnntannggttaacaccggcttcnnnnnnnnnntcatctgtgtcagacgacctgcagatnnnnnnnnnnnnnnnnnnnnnnnnnnnnnnnnnnnnnnnnnnnnnnnnataacaccgtcggacaacgcaaatcgtaaatcagcacnnnnnnnnnnnnnnnnnnnnnnnnnnnnnnnnnnnnnnnncggtacagcatcccggtcagtcgcatggcagccccnntcatccgnnnnnnnnnnnnnnnnnnnnnnnnnnnnnnnnnnnnnnnnnnnnnnnnnnnnnnnnnnnnnnnagcctgacgaaccttgtccatcagcatntcatcatcnnnnncatggtcaacacgcagatgtgccttgatctcttccagtgtcannnnnnnnnnnnnnnnnnnnnnnnnnnnnnnnnnnnnnnnnnnnncagccagggtccagcctgatgaatgagcttctccgggtttatcaccggtcnnnnnnnnnnnnnnnnnnnnnnnnnnnnnnnnnnnnnnnnnnnnnnnnnnnnnnnnnnnnnnnnnnnnnnnnnnnnnnnnnnnnnnnnnnnnnnnnnnnnnnnnnnnnnnnnnnnnnnnnnnnnnnnnnnnnnnnnnnnnnnnnnnnnnnnnnnnnnnnnnnnnnnnnnnnnnnnnnnnnnnnnnnnnnnnnnnnnnnnnnnnnnnnnnnnnnnnnnnnnnnnnnnnnnnnnnnnnnnnnnnnnnnnnnnnnnnnnnnnnnnnnnnnnnnnnnnnnnnnnnnnnnnnnnnnnnnnnnnnnnnnnnnnnnnnnnnnnnnnnnnnnnnnnnnnnnnnnnnnnnnnnnnnnnnnnnnnnnnnnnnnnnnnnnnnnnnnnnnnnnnnnnnnnnnnnnnnnnnnnnnnnnnnnnnnnnnnnnnnnnnnnnnnnnnnnnnnnnnnnnnnnnnnnnnnnnnnnnnnnnnnnnnnnnnnnnnnnnnnnnnnnnnnnnnnnnnnnnnnnnnnnnnnnnnnnnnnnnnnnnnnnnnnnnnnnnnnnnnnnnnnnnnnnnnnnnnnnnnnnnnnnnnnnnnnnnnnnnnnnnnnnnnnnnnnnnnnnnnnnnnnnnnnnnnnnnnnnnnnnnnnnnnnnnnnnnnnnnnnnnnnnnnnnnnnnnnnnnnnnnnnnnnnnnnnnnnnnnnnnnnnnnnnnnnnnnnnnnnnnnnnnnnnnnnnnnnnnnnnnnnnnnnnnnnnnnnnnnnnnnnnnnnnnnnnnnnnnnnnnnnnnnnnnnnnnnnnnnnnnnnnnnnnnnnnnnnnnnnnnnnnnnnnnnnnnnnnnnnnnnnnnnnnnnnnnnnnnnnnnnnnnnnnnnnnnnnnnnnnnnnnnnnnnnnnnnnnnnnnnnnnnnnnnnnnnnnnnnnnnnnnnnnnnnnnnnnnnnnnnnnnnnnnnnnnnnnnnnnnnnnnnnnnnnnnnnnnnnnnnnnnnnnnnnnnnnnnnnnnnnnnnnnnnnnnnnnnnnnnnnnnnnnnnnnnnnnnnnnnnnnnnnnnnnnnnnnnnnnnnnnnnnnnnnnnnnnnnnnnnnnnnnnnnnnnnnnnnnnnnnnnnnnnnnnnnnnnnnnnnnnnnnnnnnnnnnnnnnnnnnnnnnnnnnnnnnnnnnnnnnnnnnnnnnnnnnnnnnnnnnnnnnnnnnnnnnnnnnnnnnnnnnnnnnnnnnnnnnnnnnnnnnnnnnnnnnnnnnnnnnnnnnnnnnnnnnnnnnnnnnnnnnnnnnnnnnnnnnnnnnnnnnnnnnnnnnnnnnnnnnnnnnnnnnnnnnnnnnnnnnnnnnnnnnnnnnnnnnnnnnnnnnnnnnnnnnnnnnnnnnnnnnnnnnnnnnnnnnnnnnnnnnnnnnnnnnnnnnnnnnnnnnnnnnnnnnnnnnnnnnnnnnnnnnnnnnnnnnnnnnnnnnnnnnnnnnnnnnnnnnnnnnnnnnnnnnnnnnnnnnnnnnnnnnnnnnnnnnnnnnnnnnnnnnnnnnnnnnnnnnnnnnnnnnnnnnnnnnnnnnnnnnnnnnnnnnnnnnnnnnnnnnnnnnnnnnnnnnnnnnnnnnnnnnnnnnnnnnnnnnnnnnnnnnnnnnnnnnnnnnnnnnnnnnnnnnnnnnnnnnnnnnnnnnnnnnnnnnnnnnnnnnnnnnnnnnnnnnnnnnnnnnnnnnnnnnnnnnnnnnnnnnnnnnnnnnnnnnnnnnnnnnnnnnnnnnnnnnnnnnnnnnnnnnnnnnnnnnnnnnnnnnnnnnnnnnnnnnnnnnnnnnnnnnnnnnnnnnnnnnnnnnnnnnnnnnnnnnnnnnnnnnnnnnnnnnnnnnnnnnnnnnnnnnnnnnnnnnnnnnnnnnnnnnnnnnnnnnnnnnnnnnnnnnnnnnnnnnnnnnnnnnnnnnnnnnnnnnnnnnnnnnnnnnnnnnnnnnnnnnnnnnnnnnnnnnnnnnnnnnnnnnnnnnnnnnnnnnnnnnnnnnnnnnnnnnnnnnnnnnnnnnnnnnnnnnnnnnnnnnnnnnnnnnnnnnnnnnnnnnnnnnnnnnnnnnnnnnnnnnnnnnnnnnnnnnnnnnnnnnnnnnnnnnnnnnnnnnnnnnnnnnnnnnnnnnnnnnnnnnnnnnnnnnnnnnnnnnnnnnnnnnnnnnnnnnnnnnnnnnnnnnnnnnnnnnnnnnnnnnnnnnnnnnnnnnnnnnnnnnnnnnnnnnnnnnnnnnnnnnnnnnnnnnnnnnnnnnnnnnnnnnnnnnnnnnnnnnnnnnnnnnnnnnnnnnnnnnnnnnnnnnnnnnnnnnnnnnnnnnnnnnnnnnnnnnnnnnnnnnnnnnnnnnnnnnnnnnnnnnnnnnnnnnnnnnnnnnnnnnnnnnnnnnnnnnnnnnnnnnnnnnnnnnnnnnnnnnnnnnnnnnnnnnnnnnnnnnnnnnnnnnnnnnnnnnnnnnnnnnnnnnnnnnnnnnnnnnnnnnnnnnnnnnnnnnnnnnnnnnnnnnnnnnnnnnnnnnnnnnnnnnnnnnnnnnnnnnnnnnnnnnnnnnnnnnnnnnnnnnnnnnnnnnnnnnnnnnnnnnnnnnnnnnnnnnnnnnnnnnnnnnnnnnnnnnnnnnnnnnnnnnnnnnnnnnnnnnnnnnnnnnnnnnnnnnnnnnnnnnnnnnnnnnnnnnnnnnnnnnnnnnnnnnnnnnnnnnnnnnnnnnnnnnnnnnnnnnnnnnnnnnnnnnnnnnnnnnnnnnnnnnnnnnnnnnnnnnnnnnnnnnnnnnnnnnnnnnnnnnnnnnnnnnnnnnnnnnnnnnnnnnnnnnnnnnnnnnnnnnnnnnnnnnnnnnnnnnnnnnnnnnnnnnnnnnnnnnnnnnnnnnnnnnnnnnnnnnnnnnnnnnnnnnnnnnnnnnnnnnnnnnnnnnnnnnnnnnnnnnnnnnnnnnnnnnnnnnnnnnnnnnnnnnnnnnnnnnnnnnnnnnnnnnnnnnnnnnnnnnnnnnnnnnnnnnnnnnnnnnnnnnnnnnnnnnnnnnnnnnnnnnnnnnnnnnnnnnnnnnnnnnnnnnnnnnnnnnnnnnnnnnnnnnnnnnnnnnnnnnnnnnnnnnnnnnnnnnnnnnnnnnnnnnnnnnnnnnnnnnnnnnnnnnnnnnnnnnnnnnnnnnnnnnnnnnnnnnnnnnnnnnnnnnnnnnnnnnnnnnnnnnnnnnnnnnnnnnnnnnnnnnnnnnnnnnnnnnnnnnnnnnnnnnnnnnnnnnnnnnnnnnnnnnnnnnnnnnnnnnnnnnnnnnnnnnnnnnnnnnnnnnnnnnnnnnnnnnnnnnnnnnnnnnnnnnnnnnnnnnnnnnnnnnnnnnnnnnnnnnnnnnnnnnnnnnnnnnnnnnnnnnnnnnnnnnnnnnnnnnnnnnnnnnnnnnnnnnnnnnnnnnnnnnnnnnnnnnnnnnnnnnnnnnnnnnnnnnnnnnnnnnnnnnnnnnnnnnnnnnnnnnnnnnnnnnnnnnnnnnnnnnnnnnnnnnnnnnnnnnnnnnnnnnnnnnnnnnnnnnnnnnnnnnnnnnnnnnnnnnnnnnnnnnnnnnnnnnnnnnnnnnnnnnnnnnnnnnnnnnnnnnnnnnnnnnnnnnnnnnnnnnnnnnnnnnnnnnnnnnnnnnnnnnnnnnnnnnnnnnnnnnnnnnnnnnnnnnnnnnnnnnnnnnnnnnnnnnnnnnnnnnnnnnnnnnnnnnnnnnnnnnnnnnnnnnnnnnnnnnnnnnnnnnnnnnnnnnnnnnnnnnnnnnnnnnnnnnnnnnnnnnnnnnnnnnnnnnnnnnnnnnnnnnnnnnnnnnnnnnnnnnnnnnnnnnnnnnnnnnnnnnnnnnnnnnnnnnnnnnnnnnnnnnnnnnnnnnnnnnnnnnnnnnnnnnnnnnnnnnnnnnnnnnnnnnnnnnnnnnnnnnnnnnnnnnnnnnnnnnnnnnnnnnnnnnnnnnnnnnnnnnnnnnnnnnnnnnnnnnnnnnnnnnnnnnnnnnnnnnnnnnnnnnnnnnnnnnnnnnnnnnnnnnnnnnnnnnnnnnnnnnnnnnnnnnnnnnnnnnnnnnnnnnnnnnnnnnnnnnnnnnnnnnnnnnnnnnnnnnnnnnnnnnnnnnnnnnnnnnnnnnnnnnnnnnnnnnnnnnnnnnnnnnnnnnnnnnnnnnnnnnnnnnnnnnnnnnnnnnnnnnnnnnnnnnnnnnnnnnnnnnnnnnnnnnnnnnnnnnnnnnnnnnnnnnnnnnnnnnnnnnnnnnnnnnnnnnnnnnnnnnnnnnnnnnnnnnnnnnnnnnnnnnnnnnnnnnnnnnnnnnnnnnnnnnnnnnnnnnnnnnnnnnnnnnnnnnnnnnnnnnnnnnnnnnnnnnnnnnnnnnnnnnnnnnnnnnnnnnnnnnnnnnnnnnnnnnnnnnnnnnnnnnnnnnnnnnnnnnnnnnnnnnnnnnnnnnnnnnnnnnnnnnnnnnnnnnnnnnnnnnnnnnnnnnnnnnnnnnnnnnnnnnnnnnnnnnnnnnnnnnnnnnnnnnnnnnnnnnnnnnnnnnnnnnnnnnnnnnnnnnnnnnnnnnnnnnnnnnnnnnnnnnnnnnnnnnnnnnnnnnnnnnnnnnnnnnnnnnnnnnnnnnnnnnnnnnnnnnnnnnnnnnnnnnnnnnnnnnnnnnnnnnnnnnnnnnnnnnnnnnnnnnnnnnnnnnnnnnnnnnnnnnnnnnnnnnnnnnnnnnnnnnnnnnnnnnnnnnnnnnnnnnnnnnnnnnnnnnnnnnnnnnnnnnnnnnnnnnnnnnnnnnnnnnnnnnnnnnnnnnnnnnnnnnnnnnnnnnnnnnnnnnnnnnnnnnnnnnnnnnnnnnnnnnnnnnnnnnnnnnnnnnnnnnnnnnnnnnnnnnnnnnnnnnnnnnnnnnnnnnnnnnnnnnnnnnnnnnnnnnnnnnnnnnnnnnnnnnnnnnnnnnnnnnnnnnnnnnnnnnnnnnnnnnnnnnnnnnnnnnnnnnnnnnnnnnnnnnnnnnnnnnnnnnnnnnnnnnnnnnnnnnnnnnnnnnnnnnnnnnnnnnnnnnnnnnnnnnnnnnnnnnnnnnnnnnnnnnnnnnnnnnnnnnnnnnnnnnnnnnnnnnnnnnnnnnnnnnnnnnnnnnnnnnnnnnnnnnnnnnnnnnnnnnnnnnnnnnnnnnnnnnnnnnnnnnnnnnnnnnnnnnnnnnnnnnnnnnnnnnnnnnnnnnnnnnnnnnnnnnnnnnnnnnnnnnnnnnnnnnnnnnnnnnnnnnnnnnnnnnnnnnnnnnnnnnnnnnnnnnnnnnnnnnnnnnnnnnnnnnnnnnnnnnnnnnnnnnnnnnnnnnnnnnnnnnnnnnnnnnnnnnnnnnnnnnnnnnnnnnnnnnnnnnnnnnnnnnnnnnnnnnnnnnnnnnnnnnnnnnnnnnnnnnnnnnnnnnnnnnnnnnnnnnnnnnnnnnnnnnnnnnnnnnnnnnnnnnnnnnnnnnnnnnnnnnnnnnnnnnnnnnnnnnnnnnnnnnnnnnnnnnnnnnnnnnnnnnnnnnnnnnnnnnnnnnnnnnnnnnnnnnnnnnnnnnnnnnnnnnnnnnnnnnnnnnnnnnnnnnnnnnnnnnnnnnnnnnnnnnnnnnnnnnnnnnnnnnnnnnnnnnnnnnnnnnnnnnnnnnnnnnnnnnnnnnnnnnnnnnnnnnnnnnnnnnnnnnnnnnnnnnnnnnnnnnnnnnnnnnnnnnnnnnnnnnnnnnnnnnnnnnnnnnnnnnnnnnnnnnnnnnnnnnnnnnnnnnnnnnnnnnnnnnnnnnnnnnnnnnnnnnnnnnnnnnnnnnnnnnnnnnnnnnnnnnnnnnnnnnnnnnnnnnnnnnnnnnnnnnnnnnnnnnnnnnnnnnnnnnnnnnnnnnnnnnnnnnnnnnnnnnnnnnnnnnnnnnnnnnnnnnnnnnnnnnnnnnnnnnnnnnnnnnnnnnnnnnnnnnnnnnnnnnnnnnnnnnnnnnnnnnnnnnnnnnnnnnnnnnnnnnnnnnnnnnnnnnnnnnnnnnnnnnnnnnnnnnnnnnnnnnnnnnnnnnnnnnnnnnnnnnnnnnnnnnnnnnnnnnnnnnnnnnnnnnnnnnnnnnnnnnnnnnnnnnnnnnnnnnnnnnnnnnnnnnnnnnnnnnnnnnnnnnnnnnnnnnnnnnnnnnnnnnnnnnnnnnnnnnnnnnnnnnnnnnnnnnnnnnnnnnnnnnnnnnnnnnnnnnnnnnnnnnnnnnnnnnnnnnnnnnnnnnnnnnnnnnnnnnnnnnnnnnnnnnnnnnnnnnnnnnnnnnnnnnnnnnnnnnnnnnnnnnnnnnnnnnnnnnnnnnnnnnnnnnnnnnnnnnnnnnnnnnnnnnnnnnnnnnnnnnnnnnnnnnnnnnnnnnnnnnnnnnnnnnnnnnnnnnnnnnnnnnnnnnnnnnnnnnnnnnnnnnnnnnnnnnnnnnnnnnnnnnnnnnnnnnnnnnnnnnnnnnnnnnnnnnnnnnnnnnnnnnnnnnnnnnnnnnnnnnnnnnnnnnnnnnnnnnnnnnnnnnnnnnnnnnnnnnnnnnnnnnnnnnnnnnnnnnnnnnnnnnnnnnnnnnnnnnnnnnnnnnnnnnnnnnnnnnnnnnnnnnnnnnnnnnnnnnnnnnnnnnnnnnnnnnnnnnnnnnnnnnnnnnnnnnnnnnnnnnnnnnnnnnnnnnnnnnnnnnnnnnnnnnnnnnnnnnnnnnnnnnnnnnnnnnnnnnnnnnnnnnnnnnnnnnnnnnnnnnnnnnnnnnnnnnnnnnnnnnnnnnnnnnnnnnnnnnnnnnnnnnnnnnnnnnnnnnnnnnnnnnnnnnnnnnnnnnnnnnnnnnnnnnnnnnnnnnnnnnnnnnnnnnnnnnnnnnnnnnnnnnnnnnnnnnnnnnnnnnnnnnnnnnnnnnnnnnnnnnnnnnnnnnnnnnnnnnnnnnnnnnnnnnnnnnnnnnnnnnnnnnnnnnnnnncanaacaacaacccgcaacatccgatttccaaaccagatgattgaacaaattaacatcgctcttgaccnnnnnnnnnnnnnnaatttttctgnntgggtcattgaatcttgccgccgggagnnnnnnnnnnnnnnnnnnnnnnnnnnnnnnnnnnnnnnnnnnnnnnnnnnnnnnnnnnnnnnnnnnnnnnnnaaagaatgatacacagtatgctctgcgatggctgttcatataannannnnnnnnnnnnnnnnnnnnnnnnnnnnnnnnnnnnnnnnnnnnnnnnnnnnnnnnnnnnnnnnnnnnnnnnnnnntagaataaaaataaagcataacnntaataatcttctacccaatcagtacattactgctgtgactccannnnnnnnnnnnnnnnnnnnnnnnnnnnnnnnnnnnnnnnattccagtttcttccaccatcgcnnnnnnnnnnnnnnnnnnnnnnnnnnnnnnnnnnnnnnnnnnnnnnnnntttgattatncccgcacactctcgcagnnnnnnnnnnnnnnnnnnctgcggtctctgtnnatgcaggaatacggcgacgatacggcgcatcagnnnnnnnnnnnnnnnnnnctgagtgcggatatagtcctgtgccccttccagctgctnnngcatngtcatcaaccgttctctgaggatgannnnnnnnnnnnnnnnnnnnnnnnnnnnnnnnnnnnnnnnnnnnnnnnnnnnnnnnnnnnnnnnnnccacgccggaggtgccggtggctnnnnnnnnnnnnnnnnnnnnnnnnnnnnnnnnnnnnnnnnnnnnnnnnnnnnnnnnnnnnnnnnnnnnnnnnnnnnnantttcagctttcgcatcggctaattccctcgnnnnnnnnnnnnnnnnnnnnnnnnnnnnnnnnnnnnnnnnnnnnnnnnnnnnnnnnncaggacaataatcaccacacacagaacacggttcatctctctttcaccccaccagtcccgataacgtcaggactcgccnnncggtggaaaagaaaatggcaaccagcatgactaaaaatgaaatgccgacaagtacacagaggctcttcaccagcgttatgagtttatcngatatcattagccncnncatcaatccgcctttgttattttccctttgnctgtatcagccaggacaaaatcaatcagcanattcgcttcntttancagcgtncggatttttgatacatgcgcggatttaacctgtttccactcattcagcccggtagcaaacacactggcaatgtttttatcccgtttcatgtcagcncaagcctgattgagttcttccatcacactcatnnnncggggattaacgacaaaacccttcgtccagtattcatagagaacatcnnnnnactcttcctgatacyggatkaccttatcgcggannnnnnnnnnnnnnnnnnnnnnnnnnnnnnnnnnnnnnnnnnnnnncagccngcaagttttcgaannnnnnnnnncaccatattgcgtngtttcccatcctcagcaaccataacgatttccgttatagttgacgcaaaacgctgtcttaacttagccaactgtgattgccaggccagccccatccccgcaacgacaggtttcatgggaacgtatggttcnnnnnnnnnnnnnnnnnnnnnnnnnnnnnnnnnnnnnnnnnnnnnncggcacggtcatcatattcatcggttatttccttttagtgatgaaccntgnntcacaggaatcnnnnnnnnnnnnnnnnnnnnnnnnnnnnnccggtatcctcaagggtcatcctgaaaggttctgtgttgtgagnnnnnnnnnnnnnnnnnnnnnnnnnnnnnnnnnnnnnnnnnnnnnnnnnnnnnnnnnnnnnnggttgactttattcacttacattttgccagttcgcaggatttcgtgttatcngtccatgtaagcaaacctcatttttcnnnnnnnnnnnnnnnnnnnnnnnnnnnnnnnnnnnnnnnnnnntgtcgatnccccagcacgccagcgcactctcctggtcacgacgggatacctgaccgtancagttgtttgaacgnatacggcantctctgccaccgtccttaatccaccnnnnnnnnnnnnnnnnnnnnnnnnnnnnnnnnnnnnnntttcgatcncctgcattaatnnnnnnnnnnnnnnnnnnnnnnnnnnnnnnnnnnnnnnnnnncgacgggaaacacttaccgggaccaatgttgtacggacagaatgnnnnnnnnnnnnnnnnnnnnnnnnnnnnnnnnnnnnnnnnnnnnnnnnnnncggtcagcggcactttgatgtttttctccacccatgccagcgccttatcncgctcaatggcgttaaccnggtcgcatttttccttcgacagcttcatgccaggaatcacaggcttaccatccannnnnnnnnnnnnnnnnnnnnnnnnnnnnnnnnnnnnnnnccagatacccgcaccatcacggtatgcngtggtgtggttgccttccttttcatccagaaactggtcgaggatttcaggnncagaagcacctgcggcaatcagcgccagaacggcagccgataaaccatagcggagtttcctgctcatcagcttactctccccgtgccgccttacnnnnnnnnnnnnnnnnnnnnnnnnnnnnnnnnnnnnnnnnnagaccaaacagcagactccccagcacgcctattgccgcccactgagacgnnnnaaccctgtccagcaactgcaggaaccagtagcccgytcccaccgctgacgtggtgtatgacacaccygttgtgattttttccatctggtacataccccgtctcccgcaatccggaagctcacaacaannnnnnnnnnnnnnnnnnnnnnnnnnnnnnnnnnnnnnnnnnagcagctcatccagaatggcatcaacctctgcatcaagacgcgcttccaggttatggcgaagttttnnnnnnnnnnnnnnnnnnnnnnnnnnnnnnnnnnnnnnnnnnnngagcgcaggacttccttcactgcctcagcagtgaccagggatgtaatttctgacatgggattttctcgtygaaaggtgtgattaagaaagttgccgctaaatgagnggctcttcgggtttgcttccggctgactgactggcgctgattttctcagcggaccttttgtcaatctgtctgcgccagacgtcacgcatggnnnnnnnnnnnnnnnnnnnnnnnnnnnnnnnnnnnnnnnnnnggagatacagcacacagaccaccgtacagaagtacagcattaactggttcagaaatgtcataatttctttccgttannnnnnnnnnnnnnnnnnnnnnnnnnnnnnnnnnnnnnnnaaaaaaccagagcacgaaagtatcgttcctttattttttctccataggtattaccaccgccagcgtccattcctgtcgctggcggttttttttatcatgccgnnnngtctgnnnngttcacttccaccgcaatgctgtnnnnnnnnnnnnnnnnnnnnnnnnnnnnnnnnnnnnnnnnnnctgtcacatgcagtttatccgccgcaaangcactgaccggtgactgcgtcagcgtgaacggtgtgccatcctgaccatcaataaccggcgtcacctgaaggctgttattcccggcaaarcggaagcccagcgtatgccattcgttatcaaatgcgccaaaggttcccagnnnnnnnannnnnnnnnnnnnnnnnnnnnnnnnnnnnnnnngtggtacnncacattcaggtcttttgcatctgtctggatgtagaacgctgccagcaggttattccccccgtctccnnnnnnnnnnnnnnnnnnnnnnnnnnnnnnnnnnnnnnnnnnnngccagtaaaacgccataacatactggttcgcagccagcactcccgaaacctnnnnnnnnnnnnnnatctgcccccctttctgtaacagagccncacnnnnnnnnnnnnnnnnnnnnnnnnnnnnnnnnnnnnnngtactccagcacccagctgcttttaccggcttccttggtcagcttcactgccttacctccggttccctccgcatcgctgaccacttctgccctgccgccactggctgaccatccctgtactttcaggcttccctctgactcgctggcaaggtaagagagcagtgttgtgacgcctgtggcttctgcaccggaaggcgatgacgggcgcacctctgatactgtcgatgatgcccccgcgtttagcgccactcttcccgcatggcgcaaaatcgccgttgccagacggtcggaaataatcccnnnnnnnnnnnnnnnnntgaaatggctcgccctgtcctgtgacgtccaggtggctgagctgtcacgccatttcgaaccgtaatatccgatacccggaatntccgggtcttcttccggtttgttcgtcgggacnnnnnnnnnnnnnnnnnnnnnnnnnnnnnnnnnnnnnnnnnnnnnnnnnacgaannggatattctnttccgnnntgtttttgtanctgccgtacaccgtctggtacgaggattcgttcttctgcttccagaaatacgtcgtgtccccncatatccagggaacaccgtcagcaganccaccgacgcactgacctgccatatccgccaggtctgcacggaatttatcaaccagcgcaccaaactgtgctgcgtgatttgccggcgtaccgccaaaatcaaattccccctgcatccacaccacggcaancagcacatttttcgggttcttcttcagtgctgcttttgttcgaccgataaggtccttnnacagcggcttgtccacaccccagcgggttgaattctccgaggcaccactcgcgtcactgtatgtgccatcngcnnnnnnnnnnnnnnnnnnnnnnnnnnnnnnnnnnnnnnncgacagcacgnnnncagcagaatnnnnnnnnnnnnnnnnnnnnnnnnnnnnnnnnnnnnnnnnnnnnnnnnnnnnnnnnnnnnnnnnnnnnnnnnntgccccacggtnccgtactgcccctttgacaggtccgctttcggatggttaaggcgactcatgtcctgcacatcatgcagacaatggtccgccggaatgatgtcgttatatttannnnnnnnnnnnnnnnnnnnnnnnnnnnnnnnnnnnnnnnnnnnnnnnnnnnccgtactgcgacgcgccagctgcttaatgcgcgggtccggacggtcatatgtctccggcagcgnnnnnnnnnnnnnnnnnnnnnnnnnnnnnnnnnnnnnnnnnnccccgccagaaccacaacaaagtaatannnnnggtctctggtggcgctgannacnnnnncnnnnnnnnnnnnnnnnnnnnnnnnnnnnnnnnnnnnnnnnnnnnnnacaacaggtgtnntcacatcaccttctgcgacaatcgcctgaataagtgctgcgccatcatccgtatacgannnnnnnnnnnnnnnnnnnnnnnnnnnnnnnnnnnnnnnnnnnnnnnnnnnnnnnnnnnntgagcaagtgcatcagcaaggtctgacggcnnnnncgccctgaccacatcgtagtgtttaaatgccatgaatcctcccnnnnnnnnnnnnnnnnnnnnnnnnnnnnnnnnnnnnnnnnnnnnnaagttacaggacaatgacagaagagagacaacagcccgcaatacgaaaaaggccgcgnnnnnnnnnnnnnnnnnnnnnnnnnnnnnnnnnnnnnnnnnngaaatattacttcacgttttgttnnnnnnnnnnnnnnnnnnnnnnnnnnnnnnnnnnnnnnnnnnnnnnnnnnnnnnnnnnnnnnnnnnnnnnnnnnnnnnnnnnnnnnnnnnnnnnnnnnnnnnnnnnnnnnnnnnnnnnnnnnnnnnnnnnnnnnnnnnnnnnnnnaatacacaatatttacaaaactaatnnnnnnnnnnnnnnnnnnnnnnnnnnnnnnnnnnnnnnnngccttgatggccctgcactcnnnnnnnnnnnnnnnnnnnnnnnnnnnnnnnnnnnnnnnngcacaccacgcattgcttgtgaatattgcgttcatcaaancggagttgaggtgccgcagcagttgtccggtaatgnccggcatcccactgagcagannnnagcgttccgcacgagatacatggtaagtcgcggtctctttctctgannnnggcgtttacggcttgttgggcttgtttnatccagtaactgcggggctttaaggcgagttnnnnnnnnnnnnnnnnnnnnnnnnnnnnnnnnnnnnnnnntgctcctctcgtcgtcgtttcttctctgctgnnnnnnnnnnnnnnnnnnnnnnnnnnnnnnnnnnnnnnnnngcaccaccactgatttgagaatgccgggtgaaaccattccttgcatattttgcatttccttcgcgctggtttagccatcrtcttcttcctcgtgcatcgagctattcgratcgctcatcagctctgcacagcagtgctcacacangtgaacttccagcacatgcagcttctgacnnnnnnnnnnnnnnnnnnnnnnnnnnnnnnnnnnnnnnnngcacnatgtcttagccaccggatatcccacaggtgagccgtgtagttgaaggtttttacgtcagattcttttgggattggcttgsgtttatttctggagcgtttcgttggaaggtatttgcagttttcgcagatgatgtcggtgawacttcgtcgytgtcgnctcatgccgccctcctgacgcccancnnnnnnnnnnnnnnnnnnnnnnnnnnnnnnnnnnnnnnnnnaatgccgctttggatacggtagtaaacatccgtcgaggactgatgaacgnnnnnnnnnnnnnnnnnnnnnnnnnnnnnnnnnnnnnnnncctttgctgtttcccttcttctcnnnnnnnnnnnnnnnnnnnnnnnnnnnnnnnnnnnnnnnnnnatccgtccatcagtgataatgcgaacttcgtcgacactctccagagccttgctgaaccatccgactgacatatcctctggcacaagcatnactaccgtctgtcgctgttgtatgcactgctcagcggctttttccacccacggcctgatattgctgtacggtgggttattccagattgcaccgtggcnnnnnnnnnnnnnnnnnnnnnnnnnnnnnnnnnnnnnnaactcaatatccagtgcatnnnnnnnnnnnnnnnnnnnnnnnnnnnnnnnnnnnnnnnnnnnnnnntttgccagcagtccttgtcgtgtgctggngtatttgatttgatagtcatgcagccnnnnnnnnnnnnnnnnnnnnnnnnnnnnnnnnnnnnnnnaaaaggcctgcgattaccagcaggcctgttattagctcagtgatgtagatggtcatcttttaactccatataccgccaatacccgtttcatnnnnnnnnnnnnnnnnnnnnnnnnnnnnnnnnnnnnnnnnccttaaaaatcaggttcgtgnnnnnnnnnnnnnnnnnnnnnnnnnnnnnnnnnnnnnnnnnncgttcttccctggtagcaaaccggtaatacaccgttcgccagaccttaccttcgataaccagaagacctgcccgnnnnnnnnnnnnnnnnnnnnnnnnnnnnnnnnnnnnnnnnttatgctggttactgttgcgcctgttagcgcggcaacgtccggcgcacagnagcnnnnnnnnnnnnnnnnnnnnnnnnnnnnnnnnnnnnnnnnnnnataattgcttctttgcccgtcatagacttgctcctttcagtccgaacttagctttaatttctgcgatcttcgccagcgcctgaacacgatttagaggtnnnnnnnnnnnnnnnnnnnnnnnnnnnnnnnnnnnnnngaagttgttttactggttcaggtnnnnnnnnnnnnnnnnnnnnnnnnnnnnnnnnnnnnnnnnnnngcgcggtcatacaggtcagttcatcggcagccttgcgncgtaattccgcgtcagtcagcgcattggctcgcatgttctggtacaggttggtaaccagccagtagtgcgcgttcgatttccatggataagactccgcnnnnnnnnnnnnnnnnnnnnnnnnnnnnnnnnnnnnnnnnccggcaatactcgtaaaccatatcaaccagctcgctgacgtttggcagtccggcgataacggatgcttcttcccggcaccatgcaacaaactgcccgggtgatgnnnnaaatggtcgattctgccgacgggctacgcgcattcctgcgttaannnnnnnnnnnnnnnnnnnnnnnnnnnnnnnnnnnnnnnnnnngttttcccggaaagccagaacccactggcggcggatttcgttcanttcgttctggtcacggttagccaggctcgccgggaaagttgccagtaactggctgaacacaccgttgatgatctgcgctacctgctgtacctgcggcttttcgtcgtactgttccggcatgttgttggcgatccgacgcatctgctcacggtcaaagttaaccatctgtgcggcgatgtttttcatagatccaccccgtaaatccagtctgtgtttgtcaggtcgagttttggtttgctggctgtcacgactgcctgttgcttgttacggttgatttcnnnnnnnnnnnnnnnnnnnnnnnnnnnnnnnnnnnnnnnnagaagttgtcctggcatgcccagcggaacagtacacacatgtcgcgatggttacgtccgtcacgttcacgcatcaggcggatatcgttannnnnnnnnnnnnnnnnnnnnnnnnnnnnnnnnnnnnnnnnncaggtcttctgctgtcccccacttgctgccgctctgaattgcagcatccggtttcaccacagaaaggtcgttttctggctggtcagaggattcgccagaattctctgacgaataatcttttcttttttcttttgtaatagtgtcttttgtgtccccctgttttgagggatagcaatcccccaatttgagggatgttttatccctcgttttaggggattttccctcgttttgagggatacaccattctgagatgtttttatttggtccaaacatgccgccttgctgcttgataatattcattctgacgagttctaacttggcttcattgcaccgtttgacgggtaactttgtaatctcgctaagttgagaatcggtgattctgtccattggtttattccacccataggttttacgcagaatggcaagcagcactttaaactgtcgcttggtcagatctgcgcccgaataagcctcaagcagcatatttgatagtctggcgtaaccatcatcgagatctgccacattacgctcctgtttggcaaagttacctctgcagaagttgagtatttttgctgtatttgtcataatgactcctgtagatttatccagtaatgacctcagaactccatctggatttgttcagaacgctcggttgccgcnnnnnnntttttattggtgagaatcgcagcaacttgtcgtgccaatcgagccatgtcgtcgtcaacgacaccccattcaagaacagcaagcagcattgagaactttggaatccagtccctcttccacctgctgatctgcgacttatcaactcccacagcttccgctgtcttctcagttccaagcattgcgattttgttaagcaacgcactctcgattcgtagagcctcgttgcgtttgtttgcacgaaccatatgtaagtatttccttagataacaattgattgaatgtatgcaaataaatgcatacaccataggtgtggtttaattggnngccctttttnngggcggggatgtgtaagagcgggaatgtcttaagcggctttaccgcgtttagttccgtactgtaaccaaaccggatcacagttaagcgccatagctatctcaaacaagaagcgcggtcgcttggttactccagcttcaatcagttgaattgattgctgtttaacaccggctttggttgccagttcggtttgcgtcatttttaacgcaattcgcctcttcttgaggcgttcagaaagagtttgcatatcgcctccattaacaaactttcttgtattttcatacaatgtatgttgtttgtcaaatacagtttttcttgtgaagattggagataaataacagaggtggcttatgagtatttcttccagggtaaaaagcaaaagaattcagcttggacttaaccaggctgaacttgctcaaaaggtggggactacccagcagtctatagagcagctcgaaaacggtaaaactaagcgaccacgctttttaccagaacttgcgtcagctcttggcgtaagtgttgactggctgctcaatggcacctctgattcgaatgttagatttgttgggcatgttgagcccaaagggaaatatccattgattagcatggttagagctggttcgtggtgtgaagcttgtgagccctacgatatcaaggacattgatgaatggtatgacagtgacgtgaacttattaggcgatggattttggctgaaggttgaaggtgattccatgacctcacctgtaggtcaaagcatccctgaaggtcatatggtgttagtagatactggacgtgagccagtgaatggaagccttgttgtagccaaactgactgacgcgaacgaagcaacattcaaaaaactggttattgatggcggtcagaagtacctgaaaggcctgaatccttcatggcctatgactcccatcaacgggaactgcaagattatcggtgttgtcgtagaagcgagggtaaaattcgtatgatcaggattgcagcgctactcacaatactcttaactaccagcgccaattctgaatgctggattgtcacaaacctgcacgggtacggggcaatgaatggcgatcgttacggatttacaaaagacagcacggaagattccgttttccacgtaacaattaatggcgataaatcatcggtttatgaatcagtctctggcgtctatccagagatgaaatacactgctttgtcatcgaacactatggtaggggaataccagtcaggaggaggaataactgttgaaacttggtcaatcactacagacaaaaaagctctttactccaaagtaatgaatatcccaggcatgcaacaacttacatcaaccaaatcctttgttggtgatgtagtcggaacctgcaaccagtaatccccacctcaatctcaataaccaaaaaacaaactattttccgtttaaaaacaatggagtttgttttgtatacctctttttacaatatttcttgtttacagcatacaatctttcttgtaattttaaaccatcagcaggacgcactgaccaccatgaaggtgatgctcttaaanntnnngccctgaagaagggcagcattcaaagcagaaggctttggggtgtgtgatacgaaacgaagcattgnncnnnannnngattccggattagctgccaatgtgccaatcgnngggggnnnnnnnnnaggactacaactgccacacaccaccaaagctaactgacaggagaatccagatggatgcacaaacacnnnnnnnnnnnnnnnnnnnnnngnnnnaggctcaatggaaagcagnnnnnnnnnnnnnnnnnnnnnnnnnnnnnnnnnnnnnnnnnnnnnnnnnnnnctcgctgaatcgcaaaccgaaatcacgagnnnnaagcgcactaaatccgatagaccttacagtgctggctgaataccacaaacagattgaaagcaanntgcnncnnattgagcgcaagaatcagcgcacatggtacnnnnnnnnnnnnnnnnnnggcataacatgcagtggacgccagaaaattaagggaaaatcnnnnnnnnnnnnnnagttacttagatattggccttgnnnnnnnnnnnnnnnnnnnnnnnnnnnnnnnnnnaactaattcagtccagtaaanntnnnnaanagggaataatatatgnntccnnnnnnnnnnnnnnnnnnnnnnnnnnnnnnnnnnnnnnnnnnnnnnnnnnnnnnnnnnnnnnnnnnnnnnnnnnnnnnnnnnnnnnnnnnnnnnnnnnnnnnnnnnnnnnnnnnnnnnnnnnnnnnnnnnnnnnnnnnnnnnnnnnnnnnnnnnnnnnnnnnnnnnnnnnnnnnnnnnnnnnnnnnnnnnnnnnnnnnnnnnnnnnnnnnnnnnnnnnnnnnnnnnnnnnnnnnnnnnnnnnnnnnnnnnnnnnnnnnnnnnnnnnnnnnnnnnnnnnnnnnnnnnnnnnnnnnnnnnnnnnnnnnnnnnnnnnnnnnnnnnnnnnnnnnnnnnnnnnnnnnnnnnnnnnnnnnnnnnnnnnnnnnnnnnnnnnnnnnnnnnnnnnnnnnnnnnnnnnnnnnnnnnnnnnnnnnnnnnnnnnnnnnnnnnnnnnnnnnnnnnnnnnnnnnnnnnnnnnnnnnnnnnnnnnnnnnnnnnnnnnnnnnnnnnnnnnnnnnnnnnnnnnnnnnnnnnnnnnnnnnnnnnnnnnnnnnnnnnnnnnnnnnnnnnnnnnnnnnnnnnnnnnnnnnnnnnnnnnnnnnnnnnnnnnnnnnnnnnnnnnnnnnnnnnnnnnnnnnnnnnnnnnnnnnnnnnnnnnnnnnnnnnnnnnnnnnnnnnnnnnnnnnnnnnnnnnnnnnnnnnnnnnnnnnnnnnnnnnnnnnnnnnnnnnnnnnnnnnnnnnnnnnnnnnnnnnnnnnnnnnnnnnnnnnnnnnnnnnnnnnnnnnnnnnnnnnnnnnnnnnnnnnnnnnnnnnnnnnnnnnnnnnnnnnnnnnnnnnnnnnnnnnnnnnnnnnnnnnnnnnnnnnnnnnnnnnnnnnnnnnnnnnnnnnnnnnnnnnnnnnnnnnnnnnnnnnnnnnnnnnnnnnnnnnnnnnnnnnnnnnnnnnnnnnnnnnnnnnnnnnnncaggnnncgacttgtnntgattannnnnnnnnnnnnnnnnnnnnnnnnnnnnnnnnnnnnnnnnnnnnnnannaataacgattcactcgaggcnnnnnnnnnnnnnnnnnnnnnnnnnnnnnnnnnnnnnnnnnnnnnnnnnnnnnnnnnnnnnnnnnnnnnnnnnnnnnnnnnnnnnnnnnnnnnnnnnnnnnnnnnnnnnnnnnnnnnnnnnnnnnnnnnnnnnnnnnnnnnnnnnnnnnnnnnnnnnnnnnnnnnnnnnnnnnnnnnnnnnnnnnnnnnnnnnnnnnnnnnnnnnnnnnnnnnnnnnnnnnnnnnnnnnnnnnnnnnnnnnnnnnnnnnnnnnnnnnnnnnnnnnnnnnnnnnnnnnnnnnnnnnnnnnnnnnnnnnnnnnnnnnnnnnnnnnnnnnnnnnnnnnnnnnnnnnnnnnnnnnnnnnnnnnnnnnnnnnnnnnnnnnnnnnnnnngagttcagnnannaacgcttattnnnnnnnnnnnnnnnnnnnnnnnnnnnnnnnnnnnnnnnnnnnnnnnnnnnnnnnnnnnnnnnnnnnnnnnnnnnnnnnnnnnnnnnnnnnnnnnnnnnnnnnnnnnnnnnnnnnnnnnnnntcgctatgcatcggtcatttnnannnnnnnnnggccagcaaaaaagccattacccnnnnnnnnnnnnnnnnnnnnnnnnnnnnnnnnnnnnngnnagaacacatccggtnnatggnnnnnnnnnnnnnnnnnnnnnnnnnnnnnnnnnntcagaggtataaaacggatgagtacagcactcgcaacgctggctgggaagctgnnnnnnnnnnnnnnnnngganncnntcganncacaggannnnatcaccactcttcgccagacggcnnnnnnnnnnnnnnnnnnnnnnnnnnnnnnnnnnnnnnnnnnnnnnnnnnnnnnnnnnnnnnnnnnnnnnnnnnnnnnnnnnnnnnnnnnnnnnnnnnnnnnnnnnnnnnnnnnnnnnnnnnnnnnnnnnnnnnnnnnnnnnnnnnnnnnnnnnnnnnnnnnnnnnnnnnnnnnnnnnnnnnnnnnnnnnnnnnnnnnnnnnnnnnnnnnnnnnnnnnnnnnnnnncgcaaggaccgtanncatccgatnnnnnnnnnnnnnnnnnnnnnnnnnnnnnnnnnnnnnnnnnnnnnnnnnnnnnnnnnnnnnnnnnnnnnnnnnnnnnnnnnnnnnnnnnnnnnnnnnnnnnnnnnnnnnnnnnnnnnnnnnnnnnnngcccgtctggccttcggatttgcnnnnnnnnnnnnnnnnnnnnnnnnnnnnnnnnnnnnnnnnnnnnnnnnnnnnnnnnnnnnnnnnnnnncnnaacgcgacatcactccggtnnnnnnnnnnnnnnnnnnnnnnnnnnnnnnnnnnnnnnnnnnnnnnnnnnnnnnnnnnnnnnnnnnnnnnnnnnnnnnnnnnnnnnnnnnnnnnnnnnnnnnnnnnnnnnnnnnnnnnnnnnnnnnnnnnnnnnnnnnnnnnnnnnnnnnnnnnnnnnnnnnnnnnnnnnnnnnnnnnnnnnnnnnnnnnnnnnnnnnnnnnnnnnnnnnnnnnnnnnnnnnnnnnnnnnnnnnnnnnnnnnnnnnnnnnnnnnnnnnnnnnnnnnnnnnnnnnnnnnnnnnnnnnnnnnnnnnnnnnnnnnnnnnnnnnnnnnnnnnnnnnnnnnnnnnnnnnnnnnnnnnnnnnnnnnnnnnnnnnnnnnnnnnnnnnnnnnnnnnnnnnnnnnnnnnnnnnnnnnnnnnnnnnnnnnnnnnnnnnnnnnnnnnnnnnnnnnnnnnnnnnnnnnnnnnnnnnnnnnnnnnnnnnnnnnnnnnnnnnnnnnnnnnnnnnnnnnnnnnnnnnnnnnnnnnnnnnnnnnnnnnnnnnnnnnnnnnnnnnnnnnnnnnnnnnnnnnnnnnnnnnnnnnnnnnnnnnnnnnnnnnnnnnnnnnnnnnnnnnnnnnnnnnnnnnnnnnnnnnnnnnnnnnnnnnnnnnnnnnnnnnnnnnnnnnnnnnnnnnnnnnnnnnnnnnnnnnnnnnnnnnnnnnnnnnnnnnntgcctggtactttgccaactatgnnnnnnnnnnnnnnnnnnnnnnnnnnnnnnnnnnnnnnnnnnnnnnnnnnnnnnnnnnnnnnnnnnnnnnnnnnnnnnnnnnnnnnnnnnnnnnnnnnnnnnnnnnnnnnnnnnnnnnnnnnnnnnnnnnnnnnnnnnnnnnnnnnnnnnnnnnnnnnnnnnnnnnnnnnnnnnnnnnnnnnnnnnnnnnnnnnnnnnnnnnnnnnnnnnnnnnnnnnnnnnnnnnnnnnnnnnnnnnnnnnnnnnnnnnnnnnnnnnnnnnnnnnnnnnnnnnnnnnnnnnnnnnnnnnnnnnnnnnnnnnnnnnnnnnnnnnnnnnnnnnnnnnnnnnnnnnnnnnnnnnnnnnnnnnnnnnnnnnnnnnnnnnnnnnnnnnnnnnnnnnnnnngnnaataccagtagaaacagacgnnnnnnnnnnnnnnnnnnnnnnnnnnnnnnnnnnnnnnnnnnnnnnnnnnnnnnnnnnnnnnnnnnnnnnnnnnnnnnnnnnnnnnnnnnnnnnnnnnnnnnnnnnnnnnnnnnnnnnnnnnnnnnnnnnnnnnnnnnnnnnnnnnnnnnnnnnnnnnnnnnnnnnnnnnnnnnnnnnnnnnnnnnnnnnnnngnngnattgcccgtcaggctaatnnnnnnnnnnnnnnnnnnnnnnnnnnnnnnnnnnnnnnnnnnnncgatgacatttgccgtagcgtacnnnnnnnnnnnnnnnnnnnnnnnnnnnnnnnnnnnnnnnnnnnnnnnnnnnnnnnnnnnnnnnnnnnnnnnnnnnnnnnnnnnnnnnnnnnnnnnnnnnnnnnnnnnnnnnnnnnnnnnnnnnnnnnnnnnnnnnnnnnnnnnnnnnnnnnnnnnnnnnnnnnnnnnnnnnntcgcattcnnnntcaagcgtattnnnnnnnnnnnnnnnnnnnnnnnnnnnnnnnnagacntcattgattcagcatcagnnnnnnnnnnnnnnnnnnnnnnnnnnnnnnnnnnnnnnnnnnnnnnnnnnnnnnnnnnnnnnnnngtatccgcaactcattgttgtgagtgtgnnnnnccganngatgaactaagacgcctggcngnncagnnnngnnnnnnnnnnnnnngttgccaggaggatctggaacttatcagtaaannnnnnngnncgnngtgagcgaaattaattaccaggcactnnnnnnnnnnnnnnnnnnnnnnnnnnnnnnnnnnnnnnnnnnnnnnnnnnnnnnnggatgaacgggaaagaaacctgcaatacatcaaaagccgcgatcaggagaacgagganattgcgctaacggtagggaagctgcgcgttgagcttgaagcagaaannnnnnnnnnnnnnnnnnnnnnnnnnnnnnnnnnnnnnnnntcgcatcaaaggagagtgatatggcgttaacacaccacgaactctgtcagattgcgtacaagttccttaagcgcaacgggttcaaggtttgctttcatgaccgcttnnnngctgtaaccagtaccggagaacagccagatgctatgggattcagaaattcagcatcatgccnnnnnnnnnnnnnnnnnnnnnnnnnnnnnnnnnnnnnnnngctgacttgttggcagatagaaaaaagcgtttccgtaaaaatccntcacttggnatgggcgactggcgattctttattanngnnnnnnnnnnnnnnnnnnnnnnnnnnnnnnnnnnnnnnnnctggggattacttcacgttgttaacggaagagtacggaaagtacatggatggcccaggggtaattgctgttggggtaatcctgacgataagccatttactgggaataagcaggttgaatgcgattacatgttatctgcattaaggcgcatggagttgagagggcaccttaatgaaatatatgacggtgtgattgttaataagaaagaaggaaacgcggcatgatcactattaccaaagggcgactgctgacaatcaagcagtggcgcgaaacatacggaccgggtagcaacgttgtactgccagcagaagaagcggaagaactggcacgaattgcactggtatcgctggaagcagagccggtggcaaagattatagctcattacccattaggagttgacgtaggcaaacaaaagttcgtacaggccattggagagcttcctgactttggcggatatctatttgccgccccgccagcgccggtagtgccggaagaagcaactccggaaaacgtagaaatgctctctggctatgtttccacgtacaaattaaccgatagcgagcgcgatattgctgccgaaatatggaacgcctgccgcaccgccatgcttcagtccggaaactttcgggaaagcaagaattcgtcaaccnnnnnnnnncgggaaatcccggaagcgtcaaccagctctccggtaactccggctcttctgcctggtggtttcaccattgaggaggcgaaggaattacatgaagacctggtacgcagccacataagcaaggccttaagtggcgaaaagatgaaaaagaaagatcgcgatgctgatttgcgctggattcatggcgttatagttcaggcagcgtggtttgtaaaagcatcactggagcagaatgcactatcgggcaactctccggtaactccggatggttggataagctgtagtgagcgaatgccggacgacaggcaggaggtgaatcaatgagctggcctgatgcaatcgtaactctgggggtggtattcgcagcagcgtttgttgtgttctcgatttgtcgatggggataaccacatgttcgctttgattcaacgcggtcagatatacacggacagagctggataccccgtggtgattactcgcatcactgagcactcagtgttctttcgacggatggacggacgatccgggcgggtacgcattggtgagttaaactgcctgttcgaacatattgaccaccaggagtaccgcaaaattctcgcggacactgagcaggaaaagcacctgaaaaaattacgagccataaaaaggaagtaaagaatgaataaagcatttgaacgatgggtccaccagcgttacggcaatcgctatgacctgacgcgagatgttgacggcttctactgtcgtgaagttgtgaagcgaatgtttgaagtgtggtgccactgccgtggatgaaaattttatgaggttggcatgcagacaatcatctatcagataacccccagcaaatggtgtacggagagagtcctcattgcatcaacagggctaaagccnggcaccattgagcgggcaagaagaaagtcatggatgcagggaaaagaataccgccattacgctgtagaaggtgatccggggcactacagtgaatgcctgtacaacatcgaagaaattatgcgatggatcgaaaaccagaaacaaccaggtgccaaaaatgcaagttccggttaacctgttaatgctcctggacgtctgggaggtttaatgagtaacgcatcatacccgacaggcgttgaaaaccatggaggatcactccgtatatggtttcactataatggcaaacgtgtcagagaaaacctcggtgttcctgacacagccaaaaaccggaagatcgctggtgaacttcgcacttccgtttgttttgcaatcagaatggggagtttcgactacgccgcgcagttccctaattcccctaacctgaaacactttggtctgggaaaaagagagataaccgttaaggcactttcggaaaaatggttggaccttaagaaaattgagatttgtgcgaatgcacttaatcgttaccagtcagtaattaaaaacatgttncctatgttgggtgagaaaaaactggtttcatccataacaaaagaggatttacttttcgcaaggagagatttgttgaccggttaccaaaagctttctaatggaaagatttcttccataaaagggcgctcagtggtcacagtaaactactatatgacaaccatagctggaatgtttcaatttgcaacagataatggttatacctcaggaaacccatttaacggtctggnnnccttaaaaaagtccaaggtaaaaccagatcctctcacccgtgacgaatttattcgttttattgaagcttgccgtcatcaacaaacaaaaaacctgtggattctcgctgtatacacgggtattcgtcacggggagctggtatcgctggcatgggaagatatagatcttaaagcaaggactataaccatccgtaggaattatacaaaacttggcgaattcactccaccaaaaaccgatgctggcaccggaaggacaattcatctggttcaaccagctattgatgctcttaaaagtcaggcggaaatgaccatgcttggaaagcaacattctgtagaggtaaagcagagggaatatgggagannnnntgtgcataaatgcacttttgtttttagtcctcaggtaataaaacagcggcagttttccggaccgcactataaggttgactccatcagggagtcatggacaagtatcttaaaacgcgcaggtctgagacacagaaaatcgtaccaatccaggcatacttatgcatgctggtcacttgccgctggagctaatcctagttttatcgcaagccagatgggccacacaaacgcacaaatggtattcaatgtttacggagcatggatgaaagacaacaatcacgaacagatagaactccttaacaaaagactatctgaaagtgtcccatgtatgccccataagaaagctgggtaaaataaaaacttgcaaaatcaattagtttacccttaatccctgtcacgttacgcgngtggcagaggcgttacggattgctgaaaccgcaacggacagacggcggtcatcggctgttcaacgatgccgatattgaccggatccgcgagatcaaacgctggatcgacaacggcgtgcaggtcagcaaagttaaaatgctgctcagtaatgaaaatgttgatgtgcagaacggctggcgcgatcagcaagaaacattactgacctacctgcaaagcggcaatctgcatagcctgcgaacgtggatcaaagagcgcggtcaggattaccccgcccagacgctcaccacacatctgtttattcctctgcgccgacggcttcagtgccaacaaccgactctccaggcgctgctggcgatcctcgacggcgtactgatcaactacatcgccatttgtctggcttcggcacgtaaaaaacagggtaaagatgcgctggtggttggctggaatattcaggataccacccgtctgtggctggagggctggattgccagtcaacaaggatggcgcattgatgtcctcgcccactcgctcaatcaactacgccctgaactattcgaaggccgtacattgctggtgtggtgcggtgaaaatcgaacctccgcccaacagcagcaactcaccagttggcaagaacaaggccatgatattttcccactcggcatttaatgattcgttaacaaatgcgctttactgtacaatcctttcgttaacataaggagtgcattatgcgcatagctaaaattggggtcatcgccctgttcctgtttatggcgttaggcggaattggtggcgtcatgctcgcaggttatacctttattttgcgtgctggctaagcgcctgcaccagcctttcaaacaggcggtctgcgatgatcgccgccagtgccaccagtaacgccccctggatcacatacgcggtattaaatccgctaagcccgatgatgatgggcgtacccagcgtgctggcccctaccgttgaggcgatcgtcgccgtaccaatgttgataatcaccgaggttcgcacgcccgccagaatcaccggagccgccagcggtagctcgaccttacgcagtcgctgacctcgactcattcccatacctttcgcaacttctgtcacgctggcatcaatcgctcccagcccggcaagtgtcgcctgcaggacgggcagcacaccataaaggatcaaggcgataatcgctggttgcagaccaaagcctatcaccggaacagcaatcgccagcactgcgacaggcggaaaagtctgcccaacggcggcaatagtttccaccagtgggcgaaattccgcgccccacgggcgagtgactgcaattccggcaccagtgccaatgatcaccgcaaacaaactcgaaattcccaccagccagaaatgagccagtgccagagctgcaaaactttcttgctgataaacgggtcgtggcagttgtgggaacaaggcagcaaacagcggctggctgtaaggcagccagaaaatcagtgccacaaacaaagcaatgagccagaacagcggatcgcgcaacatcttcatacgcttacgcctccaccagcagatcctgaaaatgcagcgtgccgctaggctggccctgcgtgttcaccaccggcagcacctcgcatccccgcgcgacaaacagggagagcgcatcgcgcagcgtcatctcttctgccagtgcctcaccttctgcccgttcttcgcgacgcacgtaatccgccacactacgtaacgaaagcaggcgcacacccagttcactacgtccaaaaaactggcggacaaaatcattcgccggacgagtcagcatcgtcagcggattcccctgctgcaccacttcaccgtgatccatcaataccagatgttctgccagccgtagcgcctcatcaatatcatgcgtgaccagcacaatggtacgccccagcaaacggtgaatgcgcgtcatctcttgttgcaacgcgccgcgcgttaccgggtccagtgcgccaaaaggttcatccatcagtaagacttgcggatcggcagccagtgcgcgcgctactcccacacgttgctgctgaccaccggaaagctgatgtggataacgctcacgtaaatttgactccagccccagtagcgccattaattcgtcgatacgatcgtcaatcctcgcccgcgaccatttttgtaattgcggcacggtggcaatgttttgtgccacgctccagtggggaaacaggccaatagattgaatggcatagcccatacggcggcgcaactccagtactggcagcgagcgaatttcttctccggcaaagcggagctctccgctgtcatgttccaccaggcggttaatcattttcagggtggtggatttgccggagccagatgtgccaatcagcaccgaaaaactcccttcctgaaaattgagattgagatcgttaacggctttttgtgcgccgaacagtttgctgacatggctaaattcaatcattacgtttcaccttcaacagtgcgattagtaaatcgaacagcgcatcgatcagcaccgccagaacaattaccgggatcacccccagcaacactaaatcaatggcgctgcttagcagcccctggaaaaccagcgcaccaaaaccgcctgcgccgattaacgccgcaatcaccgccatgcctacagtttgcaccatcaccacccgcaggctgcgcagaaataccggtaacgccagcggtaactgaacatgcaggaatcgctgcgccccgctcatgcccatcgctctggcgctctccagcacatcgcgcgggatctggttcaagccgactaccacgccgcgcaccagcggtagcaaggcatagagcaccagcgcaatcagtgcgggtgtcattccggttcctgctatgccaagcttccccagccacggaaaggccgtaaccagtccggcaagcggcgcaatcagcaggccaaagagcgccacggaaggcacggtctgaatgacattgagcagagaaaaaatcgccccctgccgcgcggtggaaaagtagcaccagatgcccaacggcacaccaatcactaacgcaggcagcaccgcaccaaacagcaacgtcagatgttgtgccagcgcgtcgtcaaacacatcctgacggttggcgtattctttcattagtgagagatcgttaagcgtgccggagtacagcaaccacagcggaataatggcaatntgcatatgcaacaaccagcgccacagcggatgcgtggagattcggcggatggcatcgctacaggccagcaatgccagcgccgaagccagccagaaaccactgccgaggctggtacgcgccagcgcactgccattttgcgccagttgggtcgccgcctttccagctccccacaccagcaatacgaagacgaattgcgccagaatgagtgcaaaaatgctgccttttttagcgggaataaaacaggctgtcagccaggcgcaaccaacgcccaccagcatccagatcgtttgcggccacagttgccagagatgacgcccttcacccgagactaaacgattaggcgcgtagctgataaacggcagcgctgctgcgattgccgtcagcaacagcagcagcgccagaacaggattaatacgtagatnagtcacgggaaattacttcgtccaccctttttgtttcaagtagtcggcagccacttttttggcatccagtccttccactgcaatgctggcattcagttgctgcaatgtttttgcatcgaggctggcgaagactggctgtagccactgtgccatttgcggatactctttcagcaccgactcacgcaccactggtgcaggcgcgtagataggttgcacgccttgcggatcgcttaaggtttgcagccnnnncgccgcgaccggaccgtcagtgccgtaagccattgcggcattaacgccagaagtttgctgggcagcggctttaatcgttaccgccgtgtcgccgccagccagtgacagtaactgatcctgatcgagtttaaagtcgtaggctttttcaaacgcgggtaacgcatcggcgcgttcgataaactcagccgaggctgccagtttgaaggtgccgccctctttcagataacgcctcaggtcagcaagcgaagtgagtttgtttttctctgccacatcctgacgcacggcgatggtccaggtgttatttgcaggtgcgggcgtcagccagattaacttgttttgctctgcatcgagttttttgactttctcgtaaccttgctgcgcgtttttccacgctgcatcgttttcatctttaaagaaaaacgcgccattgccggtatattccggatagatatccagttcaccggaagtaatcgccccgcgcaccacaggagtcgttccaagttgcactttattgaccgttggtactccgtggctttcgagtacttgcaaaatgatattgccgagcagcgcgccttcggtatcgatttttgaaccgactttaacgggggaagccgcgtgcagcggcaggctcacggctgccaacaaaaccagtgaacctgcccagacctttgagagtggcatgatgctttcctcattcttttactgttgttttcagcgaattaagagaaaagcatagttgataatggcgggattagcctgagcggacggattcagttgcagaatcagataaatacttaagaggcatattcggtccggcgtttcctgccggatgcggcgcgagcgccttaaccggcctacaaagggcgaaaattcagcaagttaagatatgaacatcaggcaaagggcgcaaacgtcgcgcccttgctaaagcattacagcaactcaaactcgcctttcttaacgcgtgcggaatcagtgccgataaagacattgaacttgccaggctcggcgtcatatttcatctgttgattccagaacttcagcgcctcgatatcaatcgggaagctgacggtctgggtttcgcccggcttcagggtgattttctcaaagcctttcagctgcttcactggacggctcatggaagccgtcacatcctgcaagtacatctgcactaccgtggccccttcgcgtttaccggtgttcgtcacctgcacgctggccgtcactttgccgtcacgcttcatggtcggcgcagaaagtttcacatcagagacggtgaaagtggtatagctcagaccatagccgaacggataaagcgccccgttagcttcatcaaaataacgcgaagtgtatttgttcggcttgtcggcattatacggacgaccggtgttcagatggctgtagtacaccgggatctgcccgacagaacgcgggaaggacatcggcagcttaccggacgggttgtaatcgccaaacaacacatcggcaattgcattaccgccttcagtcccggcaaaccaggtttccagaatcgcatcagcctgctgatnttctttcaccagcgccagcggacgcccgttcatcagcaccagcaccagcggtttgccggtggctttcagggcggcaatcaaatcacgctggctttgcggaatagtaatatcggtacggctggaggcctcgtgcgccatcccctgtgcttcaccgactacagccaccaccacatcagattgtttcgccgtctgcaccgcttcatcaatcatctcttgcggcgaacgcggatcgactttgaccgcttcttcatactgattcaggaaatcgataatgcctttgtcactggtaacgttcgcccctttggcatacagcactttaccgttttcaccgacggcatttttaatcccggtcagcacggtcacggattgatcggcaacacctgccgccgaccagctgcccatcacgtcacgtttactgtccgccagtggcccaaccaccgcaatggtggctgattttttcagcggtaacgtttcgagacggtttttcagcaacaccaggctttcacgcgccacttcacgcgcttctttgcggtgcaggcggctttcggcattggtatccaccgggtcagactctttcggaccgagatggctgtatgggtcgttaaacaaccccatatcatatttaacgttcagtacatggcgggcagcatcgtccagctctgccatcgtcactttaccggatttgatcaacccaggcagatacttcgagtagtactcgtcgctcatgctcatgttgattccggatttcagcgccacgcgcactgcatcttccggatctgccgccgtgccatgtttaatcagctctttgattgcaccgtgatcggaaacggtgatgcctttaaagccccactggtcgcgcagaacatctttcagcagccaggagtcggaggtggctggcgtgccgttcagcgagttcagcgccaccatcaccgcgccgctgcctgcgtccagccccgctttgtacggcggcatataatcattaaacaggcgctgcggactcatatcgacggtgttgtactctttaccgccttctaccgcgccgtatgcggcaaagtgtttgacgctggtcatcaccgagtaacgatctgccgggcttttaccctgcatcgcttccaccatggttttacccattattgaggtgagatacgtatcttcgccaaaaccttcggaagcacgtccccagcgcggatcgcgcgagacatcgaccatcggtgcccaggtcatattcaggccatcatctgccgcttcataagcagagacacgtccgaccgtttttactgcatcgaggttaaaagacgaggccagaccgaggctaatcgggaacaccgtgcgctgaccgtgcagcacgtcgtaagcaaagaaaagaggaattttcaggcggcttaattccatcacctgatcctgcatggcgcggatatcctgacgggttacggtgttgaaaatagccccaacctgaccgtctttgatcatctcgcggatcgcctctttcgggttatccgggccgacgctgattaagcgcagctgaccaattttctcatcaactgtcattttcttaagcagttcggtgacgaacgcatcccgcgcttcaggcgttaatggatggttaccgaataaatcatccgccagtgctggctgcagggccagactcaccgcgattcctactgaacatagccatttcatatggatttttcttcctttgttgcccgacgtggcagcgaaaatggtgcaaaaaccgtagtttgccataagcatgatggagagagaaaaagaatgctcagtttattgtctgaattttcaaaatattcactcgctgaattgtcatacaaggcgctattctagtttgtgatgttttttcgccaccacaaggagtggaaaatgtcttccatgacaacaactgataataaagcctttttgaatgaacttgcccgtctggtcggtcattcacacctgctcaccgatcccgcaaaaacggcccgctatcgcaagggcttccgttctggtcagggcgacgcgctggctgtcgttttccctggctcactactggaattgtggcgggtgctgaaagcctgcgtcaccgccgacaaaattattctgatgcaggctgccaatacaggcctgaccgaaggatcgacgccaaacggtaacgactatgatcgcgatatcgtgatcatcagcaccctacgtctcgacaagctgcacgttctcggcaagggcgaacaggtgctggcctatccgggcaccacgctttattccctggaaaaagccctcaaaccgctgggacgcgaaccgcactcggtgattggttcatcgtgcattggcgcatcggttatcggcggtatctgtaataactctggtggttcgctggtgcagcgtggcccggcgtataccgaaatgtcgttattcgcgcgtataaatgaagatggcaaactgacgctggtgaaccatctggggattgatctgggcgaaacgccggagcagatccttagcaagctggatgacgatcgcatcaaagatgacgatgtgcgtcacgatggtcgtcacgcccacgattatgactatgtccaccgcgttcgtgatattgaagccgacacgcccgcacgttataacgccnnnncggatcggttatttgaatcttctggttgcgccgggaagctggccgtctttgcagtacgtcttgataccttcgaagcggaaaaaaatcagcaggtgttttatatcggcaccaaccagccggaagtgctgaccgaaatccgccgtcatattctggctaacttcgaaaatctgccggttgccggggaatatatgcaccgggatatctacgatattgcggaaaaatacggcaaagacaccttcctgatgattgataagttaggcaccgacaagatgccgttcttctttaatctcaagggacgcaccgatgcgatgctggagaaagtgaaattcttccgtccgcattttactgaccgtgcgatgcaaaaattcggtcacctgttccccagccatttaccgccncgcatgaaaaactggcgcgataaatacgagcatcatctgctgttaaaaatggcgggcgatggcgtgggcgaagccaaatcgtggctggtggattatttcaaacaggccgaaggcgatttctttgtctgtacgccggaggaaggcagcaaagcgtttttacaccgtttcgccgctgcgggcgcagcaattcgttatcaggcggtgcattccgatgaagtcgaagacattctggcgctggatatcgctctgcggcgtaacgacaccgagtggtatgagcatttaccgccggagatcgacagccagctggtgcacaagctctattacggccattttatgtgctatgtcttccatcaggattacatcgttaaaaaaggcgtggatgtgcatgcgttgaaagaacagatgctggagctgctacagcagcgcggcgcgcaataccctgccgaacataacgtcggtcatttgtataaagcaccggagacattgcagaagttttatcgcgagaacgatccgaccaacagtatgaatccggggatcggtaaaaccagtaagcggaaaaactggcaggaagtggagtaaaaattacggatggcagagtatcgccatccgaattcacttaatcgttctgtgccgtctgccccgccgnnnncatttgggcggctttttgttttttatagcttaacgctgctgccggaacaggcatcactttaccggtttcaatccaggtacgcaggcggctggcatcggcaaaatgggtgtatttgccaaacgcatccatcactaccagcgccaccggtttattattgataaccgtacgcatcaccagacaatggcccgccgcattggtaaagccggttttggttagctggatattccagttatcgcgatacaccagatgattagtattgcggaacggcagcgtatacgtcgggttagagaaggttgccatatcttcccgggtagtacttaactgcccgatcaacggatattgtttgctggcaatgagcagtttggttaagtcacgggcggttgaaacgttatgcaccgacaatccggtaggttcaacaaagcgcgtgttgttcattccgagcgatttcgctttcgcattcattgccttaataaaggctttgtaaccaccgggataatggtgcgcaaggcttgccgccgcgcggttttctgaagacatcagcgccagcaacagcatatctttacggctgatttcgctattcagtcgtacgcgcgaatagacccctttcatctccggcgtctggctgatatccacttttagtttttcatccagcggcagtcgtgcatccagcacgaccatcgcagtcattaatttgctgatagacgcaatcggacgcaccagatccgggtggttcgaatagatcactttgttggtattcagatcaacaatcatcgcgctaccggaggcaatttccggttgtgaagcggtggtagcggctgccgttttcgcaacggcctgcggtgccaaaggcacagccagcatcagggccaggctaaataaagaaactcgaaatttcggcatgatgagcattcagatagtggttcacgcgcacgggttgcgcaccgccggagtaaggatttactgaggctagcgacgccatcataacgagcaaaaagtgcgatcgtcaaaggagaatcgtgaggaaatgctgcattgctgacatttacgccagcaatgcaacgtcaaagaactttctagaacaaacgataaccgtagccccatagtataacggtaagggcgagcagcacttccagtaccagcacgccaatcgccagcgtcgaactggagaagctaaggccttcctctttgttgatattcaggaagctcggaataccaaggtaaagtaggtaaccggtgtaaaacagtgccaccgtgccgaccagcgcacacaaccagaccagcggataaagcgccaccagaccanttaaaaacagcggagttgcaacgtagcccgcgaagaccatgcagtgcgcaagtgacggacgctgcggataattacgcgccatccaccagatgacccgccccatcaccgcgaccccagcgagcataacgccataaaacaggacagccagcgccagtccggtaaaccaggataacttcaggatagtgccatcgccaaaattccagccaatctgtgtagtgccaatgaaggcgcaaatcaccggaatcgccgccatcagcaaaacgtggtgggtgtaatggtgagaaatcgtttcgttttcgcgattaatcacctgcatttcacgatcgggatgggaaaacagtccccagacatggctcataccgcccccttgttgtgagttcatgaacctgacagttcaagtataagtcagcttgtgattattttttgttcgcccatgtaatttgcaccgtctgatgtacgtcctttttcagcgtgaatgattcacagggtgtatgcttacaggcaaccaaagggagacagactggcctatggatctcaatacactcatctcacaatatggttatgccgcgctggttatcggtagcctggcggaaggtgaaaccgtgactttgctgggaggcgttgcggcacatcaggggctattaaagttcccgctggtggtactttctgtagcgcttggcggcatgattggcgaccaggtgctctatctgtgcgggcggcggtttggcggtaagctgttacgccgtttctctaaacatcaggataaaattgagcgggcgcagaaactgatccaacgccatccgtatctgtttgtcattggtacgcgctttatgtatggctttcgggtgattggcccgacgctgattggtgccagccagctgccgccgaaaatctttctgccgcttaatattctcggcgcatttgcctgggcgttgatttttaccactatcggttacgctggtggtcaggtgattgcgccgtggttgcacaatctcgaccagcatttgaagcactgggtctggttgattctggtcgtggttctggtggtaggcgtgcgctggtggctgaaacgacgcgggaagaaaaagccggataatcaggcgtaaaaccattgccctggataaggcgtgcgcnccgcatccgacatccggttcaccatgcctgatgcggcgcttgtgcgtcttatcatgcctaccaaaattttacccattgaaatatccacacacctcactgcgctattctgggttgaactgcggattcgccaacataaagccgccatccactatcaacgactgcccggtggtgtaatttgcgccctccgaacaaagccacgccaccaggctggcaatctcatgcgttgcgccaaaacgccgcagaggaatcgaaggctccgcgtcgggcttcacgtcgctatcatccatgccgttcattggcgtagcgatcgccccaggtgcgactgcgttcaccaaaatcttatgcctgaccaactccagcgccattgctttggttaacccgccgagcgcatgtttagcggctgtgtaggcgctggcatccggcagcggcgtatgttcatgtaccgacgtaatgttgatgatgcgaccaccctgtccttgtttcaccatctggcgggcagcaatttgcgagcataaaaatgcaccatcgacatcaacggtaaaaatcttgcgccactcatcgaaagccatatcaagaaacggcactttggtcattgcgcccgcattattcaccagcacatcaatacgccccagccgttgaataagtttctccagcgcctgcgcaccttctggcagattgccgagatccagttgcacgatctccgcacgtacgccgtggctaactacctcacgcgcggtatcttttgccccttcttcatctgantgccaggtaatgccaatatcaaacccttgctgcgccagtaataacgcgcactctttgccgatccccgaatcggangcggtaataatcgctacctgtgccatcgagttctccacttaacgctgaataaacgttaagtatagaagtcacatatcatcagcgtttgtaacccccgcccaacgcaccagtganttgaatggaggcatccagccactgcccttgcaataacaggccattggcccgctcacgcagcgcggggattctggcttcgctgacgcgggaaccagcaatgatgcccgcgttaaagcgggcctgcgcaagacctaccacacgcaaggcatcgcgctcaatttgcgcctgatgctggtttttctccgccagtgtctgaacctgactggctgcccgcgccacgtcattcaccgcttcaaccaccgctttgttgtagctggcgatagacaagttgctttcggcttttgcgatatcgagattggcgttaagacgaccactatcgaaaatgggtagcgtcaggcctgccgtaacgcccatttgctgcgcggaatgacggaacagatcgcttaagtgcaacgcatcctgttgcaggaaggccatcaggttgatgtcaggataaaatgccgcttttgccgcatcaatggtgcttagcgatgactcaacgtaccagtgcgccgcctgcaaatctgcccgccgggccagtaaggagtaccccagttcatcaggaagctggcttgccactttcggcaacgcgaccggtttaagcgtcaatgacttagtctggtgatttgtgagtgcaattaaccgtgcctcaataattttcattttccccgcgacatcgttganctgctgccgggttttgctggcattaatatcggtttccacaccttcaactgaagaagtaatcccgttctgatatagctggcgatcggtcgcgataatggtgttctgctctttttcgatttgctgcaagaccgtgtttaacgccgcctgggtttgccactcccagtacaggcgggctacgctgccagccagcaattggcgggtttgctcgcgttccgccgcccgtgctttaaccgtacccaggcgggcagtaacntccgcccgattctttccccagatatcgagatgccagcccgccgttaagccaaaagttccgttggtgtaccacggaccggtcgtacctgcggccggatcgttcagagcaaacggccccattagcccttctgccgacattttttgccgctccatatccgcagaaaagtcgatctgcggaccatcctgagtagcaactgccttcgcctgggcttcagctaactgaatgcgctgttcagccacctgcatatccggtgcgttctgtagtgcattgttaattaaggaagtgagttgattatcgtgatactccagccaccattggctgtctggccaaccatttttcagcgccgtgggtaatgcggtgtcaacttgtgcagcgggcgtttgctggcttaacgcctggcgggtttcatgcataggcgcacacccggccagcatcagtaacagcggaaaacaggcgatggctggataaaaggaatcacgattcatgggggaataatcaggtaagaaaaggtgcgcggagattaccgtgtgttgcgatatattttttagtttcgcgtggcaatacatcagtagcaataaaacgacatatccagaaaaatatacactaagtgaatgatatcttccgatttatcttaatcgtttatggataacggcaaagggcttcgttttttcctatacttattcagcactcacaaataaaggaacgccaatgaaaattatactctgggctgtattgattattttcctgattgggctactggtggtgactggcgtatttaagatgatattttaaaaatcagatatgacatataagttgtcaagtcaggaactagatattttgtgtacttgatttgcaaacagctccggtgttggtggcgtcaaaatcgctgaagcgttccccgaaggccggggcagcccacatggatgtgggctgagggcgcgtcttacaaggacgtttcctcgcgcccgacccggtagccgaaggggataagctgaaggtaccgcgcagcggcgattttgttcgccagancccgggggtgcagggggaggaggcgattgtcctccccctgcgcgctccttgcgccagtggcaatatgtggcttagctcatgaaaggagcgcaacaagatgatgaagctgaataagcgattcattgtttctgataaactgcgattccactattatcgcagcttaccgatatcaattgcctgaatagcccttgcaatatcaggggaattattcaacacacgaacatgctgaaataattctgttgcttcatcgtattctttacgcaaataactcaaccactgtttaatccgcgctacgtgatataacccggtatcgccctgcttttccagacgggtatatttttgcagcaaagcaaccacctccggccacggcattcgcggttcgttatattttactacccggctcaggttgggaatattgagcgccccgcgaccaatcatcactgagtcgcagccgctgatcgccatgcattcttgcgtgctctgccagtcccagatttcgccgttggcaatcaccggaatattcagccgctggcgaatctcgccaatcgcctgccagtcaatatgctccgcgcggtaaccctgctcttttgtccgtccatgcaccaccagctccgtagcaccagcctgttgaaccgcatcggcgatttcaaatttcttctcaccgctgtcccagcccagacgcactttcacgctgacgggcaaatgcgccggtacagcttcacgcatcgcttttgcaccctggtagatgagttcaggatctttgagtaacgtcgccccaccaccgctaccgttaaccgttttcgacgggcagccgcaattgagatccacgccccaggaacctaattccaccgcacgggnggcgttntctgccagccattgtgggaactgacccaacaactgcacgcgcaccagcgtaccggatggtgtccggctggcgttttgtagctcagggcaaatgcgatgaaagactttcaccggcagcagttgatccaccacgcggacgaactcggtgatgcacagatcgtagtcgttaacttcggtcagcaattcacgcaccagagagtcaagcactccctccatcggagccagtaacacacgcatatcatcacccgcaaaaaaatgaggcgctatgttagcgcctcctgtgtttgcagacaaactgacttactgattaattcgggcaagatttttaccctcaccctaaccntctcccgaaggggcgaggggaccgcccgtgcgcctgattgggtgaagaagtgcttagcgtggttgcaaacagttatcttctttccagccgtacaaccactccatgccgcgataaaattctgcctgcgatttccctttccacagcagattacgtacctggcgttctacccctgcggcgtggtaaacccgccccatttcacgggtcgaccagacgatgcgcgcggtgcgcggaattcgtaccgactcatacagcgcaaaggcttgcgccgcatcaccctcacactgcgccagcgccttacccagcgttactgcatcttccagcgccatacaggctccctgcgccatatannnngccaccggatgggccgaatcgcccacaagcgttatgcgcttcgttccccacttcgccaccggttcacggtcagcggttgaccagcgtcgccatgaagtcggtttatccaacatctggcgcggacgggggtgaatcccttcaaagtaagagagcacttcctctttactaccatccttcacgccccactcttcctgctggcggctgtggaatgttaccaccaggttatactgcttgccgccgcgcaaagggtaatgcaccaagtgacaatgcggccccgcccacagtaccggtgcgttaatgcgcaaatcttccggcatatcggcacgatcgataaccgcacggtagacaacatgtccggtgacacgcggcgcatcgcccaataagctctggcgcaccactgacttcacgccgtcacagccaatcagaatatcgccggtccagctattgccgcgatcgtcaaacacggtgacatcgtcttccgtctcgcgaatatccacgacgttggtggaggtgtgatattccacgtccggatgcgtcagtaccgcttcccacaccgaggcgtgaatatcaacccggtggatcaccgcgtaagggccgccgaaatggtcacgaaaggcctgcccggtttcaatgcacaccacttcttcggcgttcaccgcatccatcatggtaatgtgatcggtaaacaccgcgcgctggcgggcaacttcgccgacgccgaggctgtccagcgccgaaaacgcatttggccccaactggatgcccgcgccaatctcaccgatctcatgcgccttttccagcagcaccactttgatccccaggcgggccagtgacagcgcagttgccgcaccgccgatcccgcctcccacaattactgcgcgtgtcactttcgtcattatagttctcctggtcaggctgaaattttatcttgttgattttctggcgctgcggcaatgaacgctggcagctgtgtgcaggcgtcgtacaccgctttgcagcgtggatacccgctcaaatcgcagttcatgcgtagcgcgttcgcccactgcgggacaaggcagcaatctgccagcgtcggcgtctcgcccacacaaaattgccccgactggttctggcgcaacagttgttccaccgcgcttaacccttgctggatccagtgcgcataccaacgttttttttcttcttcactgacgttcagttcttcggtcaggtagcgcagcacgcgcaagttattcaatggatgaatatcacaagcgatggcatagacaatttccagcaccttgttgcgggccggctcttcctgcggcaccagcggaacttgcgggtagtgcctctccagccagtcaataatcgccagcgattgtccgagtgattcgccctcgtcagtcagcagcgtcggcaccagcccgaccggattcatccgccgataggccagttcattttgctgaccaatacggatattcaccccttcggtctggtaattaatgcctttcagcgccagcgcaatgcgtacccggtacgacgctgaactattaaaaaaactgtacagcttcatcatgcacctcagacaatcttcaccgcgataggcgttaagccctcgacgttgcctgtgatcacatcacctttcactaccgggccaaccccttccggcgtaccggtgaagatcagatcgcccggttgcagctcaaagaagcctgacagatagctgatggtttcattcaccgaccagatgagatggcgaatatcgctgcgctgatgatcttcgccgttaacctgtaaccagattggcgcattatcaataccgccgatatcgcgggctttgtgcagcggcgcgatgggcgctgagagatcaaacgctttaccgatttcccacgggcggcccatctggcgcatttccatttgacggtcacgccgagtcatatcaagacccgtggcataaccccagacatattcatgggcgtgttccagcgggatatcgctgccttttttaccaatcgccaccaccagttcaatttcgtaatggtagttatcggtctgtgccggatacggcagcgccagcgtttcaccagcggcaaccggaacaacggcatccgccggtttgcagaagaagaatggcggttcacgatccggatcaaagcccatttcgcgggcgtgagcggcatagttacgtccgacgcagtaaacgcggcgcacggggaattgttcatcactgccaacaaccggtacggtaacgggcgcttgcggttcgaatacgtattgagtcatttttctctcctaaattaataacgcgcttcgcggaacagccccagggcttcttgtaccggcctgtccgaaaaactaaataaaacggaatcttgcgtggtctggaacgacacgccatgccaggtcggcaccacgaagatatcttttgcactaaagctgaaggtttcattgccgatgatgacctgcccgctaccttccaccacatggtagatggtgctgtcagtggtacgcgcaacgcgtgaggcaaaccctttcggcagcagttgcaggaaagcgcccatcgacggcatcggatagccgccggtgaccgggttgacgtagcgcattttgtagccatcccactcgtcggcatcgcccagtcgggttaaatcgtgcagcacttcgcggctgcggtcataacgatagttaaagatcggcgaggagttccccgtctgatgccgcagcggcaacatattggcagcgtaacgcggcagataatctccctctttacgcgttaccggttgttgctcttccggataatcttcggcaaaaccgcagcccagaatattcactaatggcagatccagcccatcgagccagataaccggttcgtcgccagggttaccgtgatcgtgccagcgccactgcggggtcaggataaaatcgccttcattcattggcgtgcgttcgccatcaacggcggtaaatgcccctttgccttcaacaataaaacgcagcgccgactgattatgacgatgactcggtgccacttcgcccggcatgatcagttgcaaaccggcatataaagtcgcggtaatggaagactgcccgcgcagcgccgggttttccagcaccagcacgcggcgcacggcctctttcgcaccaatcaggccgccgctctccagtagcagcgggcggatctcctgataattccagtacgctggcgcacagttagcgttgggcgttttcggcaccagatggtgcagtgactcccacagcggggtcaggttttgcccggaaatatgctgataaaattgctcgcggctattttgattgttatcagtcattgagatgctccttattcgttcacaacgcctgcgcgaggcagtgagtcagggacagaggtcgactggcgaaccacggtaatcagcagggttaacatcaccgcactgatcgccgcaggcacagcgataatgaaaaacagggtgtcgaaagagaaattcatcgccatcatcacgccgccagacagcgaaccaacaatcgcgccgcagcggccgatagcatttgaccagctcacgcccgtggctcgactttgtgttggataaagtgttgcggtcagcgcattcagccccacctgcgatccgctaatgccaatgccagtgccgaaaatcgccagcgccatcaaccataatccatcctggcttaagccaatcatcacgatgcatatagcgcctatggcatagctcagcgccagcacgcggaaaggattgaacttatccatcagcacacccagcgccagcgcgcctaacgtaccaccaatctggaacgcggcggtgacccaggacgcgtgttgcaggtcgatgccgcgatggttcagtagcgtcggcatccagcttgagagcaggtaaataatcagcaggctcataaagaacactacccacagcatcaacgtgatgggtaactgacgtcccataaacagttgacgaatgctgccttttgtaacggaggctgattcaatgagataaaagtgggtatcgacataacgctcgcgggtgatggcgctgacggttttcgcaatcaccgcctgcggtagctggcggcgcacctgccagcgtggcgattccggcagaactaccagcagtgcgacaaacagcatcagcggtaacacgccccccaacaccagaatgccgtgccagccaatcaccggcaccagctgcgcactgacaatcccgccaaacgccgaacccagcgtaaagccgcaaaacatcagcgtcaccagcgcgccgcggcggcgggcaggcagatactccgaggtcatggtgatggtgttcggcatcgcgccgcccagacccaggccggtgagaaagcgcaggaagaccagcgtttgcagatccggtgagaaagccgaggcgaggcttaacgcgccaaacaaaaagacgcacagctcaatcacccgcttgcgaccaaagcgatcggacaacgggccacaaagcagtgcgcctgcggttaatcntagcagacccgcgccaaaaagcggggcgagatcgcctgcggtgagttgccagtgagtgcgaatatcaggggcgataaatccgatagccgcggtgtcaaaaccatcgagcattaccaccagaaaacagcagatgataacgcgccactgcatcttgccgaccggagcagcatcgataagtgcttgtaaatcacgtcgttgagtcatagtaaatgcctcagtgcaggtaaggtagatgtttcttttgttttgtatatgttgcgatattgtgattaaagagatgagatgtacaatggcatttcgggcagagagataacctggaggttatggcaaatggcgaactgggcgcaaaaattaaaactacatcaccttgaaatgctggtggcgctgggtgaacagggcaatctaacccatgtcgcacgaatgatgaatatcacccaacctgcgctttcgaaatggttgtcacaactcgaagatgagattggaatcacactttttgagcggcacagcaaaggattacgtccgactgaaggcggcaaattgttattgcaacatgcccaacggttaatcaatgacatggagcgatcgcaacatgaactggcccgttttaaacaaggtggactggtcggcagtctgaaaattggctgttctcccgtcgccactgactgcgtatcccaggcgattttgcatttgcttacgaagatgccaactctacacctgaatatcgaagagaaggtgatgaccccattgctgcaagatctattggcaggttctgtcgatgtggtcgttgggcgaattggcggtcgcgcattgcagctgccactgaattatcaggtgctgtacaccgagccagtatgctttgtcgcccgccctgagcacccactggcgaaatacgccaccctcagctggaatgatcttgccaactggcgctggatcgtctggccgacgggtacccccattcgcattagtattgataatgcgctggtagaccacggcgtaatgctgccagaaaacacgattgagtcggcgtcgatgaacgtcagtaccaacctgttacaaagcagcgatatgatctctattttgtcattacgcctggcgcaacgttatgccagccagggacaactggtgatactcaacctgccaaagatagaacagaaaggtagcgtcggtgtgttctggcgcaataacgaaacgccttcttatgctttaagtcagtttctgcactttttacagcagaattagtgtgctgaacggggcgctcgcccgaggttacctccctaaaattcaactatgctgagaattcttaatgtgatcggtagcacgttttacgaattaattgtatgatgaatccatctcatctggggtgttgattatgagtaagacactgaacattatctggcaatatttacgcgctttcgtcctgatttatgcctgcctgtatgcaggcattttcattgcttccctgctaccggtaaccattccgggcagcatcatcgggatgctgatcctgtttgtcctgctggccttgcaaattcttccggcgaaatgggtcaatccggggtgctacgtactgattcgctatatggcgctattgtttgtgccgattggcgtaggcgtcatgcaatattttgatttgctccgcgcacagtttggcccggtagtggtttcctgtgcaatcagtacgctggtggtttttctggtggtgagctggagttcgcaactggtacacggtgaacgtaaagtcgtaggtcagaaaggatcagaagaatgatggcgaatatctggtggtcattaccgctgacgttgattgtcttttttgccgcccgcaaactggcggcacggtataagtttcccctgcttaacccgttgctggtagcaatggtggtgatcattccttttttaatgctgaccggcatctcttacgacagttactttaaaggtagcgaagtgctaaacgatctgctgcaaccggcggtcgtcgcgctggcctatcctttatatgagcagctacaccagatccgcgcgcgctggaaatcgatcatcaccatctgttttatcggcagcgtggttgcgatggtgacggggacttccgtggcattgttgatgggcgcttcaccggaaatcgccgcgtcaatcctgccgaaatcagtcaccacgcctattgcaatggcggttggcggcagtattggcggtattccggcaatcagcgcagtttgcgtgattttcgtcggcatcctcggcgcggtatttggccatacattgcttaatgcgatgcgtattcgtaccaaagctgcgcgcggtctggcaatggggactgcctcgcacgccctcggtacggcgcgctgcgccgagctggattatcaggaaggtgcatttagttcgctagcgctggtgttatgcgggataattacttcgctgatcgcaccgatccttttcccgattattctggcagtaatgggctaaaatttgcgatgcgtcgcgcatttttgatgtaagtttcacgcgttgcataattaatgagattcagatcacatataaagccataacgggttcgtaaactgttatcccattacatgattatgangcaacgccatgcatccacgttttcaaaccgcttttgcccaacttgcggataacttgcaatctgcactggaacctattctggcagacaagtacttccccgctttgttgaccggggagcaagtctcatcgctgaagagcgcaacggggctggacgaagacgcgctggcattcgcactacttccgctggcggcggcctgtgcgcgtacgccattgtcgaattttaatgttggcgcaattgcgcgcggtgtgagcggaacctggtattttggtgccaatatggaatttattggtgcgacaatgcagcaaaccgttcatgccgaacaaagcgcgatcagccacgcctggttgagtggtgaaaaagcgcttgcagccatcaccgttaactacacgccttgtggtcactgccgtcagtttatgaatgaactgaacagcggtctggatctgcgtattcatctgccgggccgcgaggcacacgcgctgcgtgactatctggcggatgcctttgggccgaaagatctggagattaaaacgctgctgatggacgagcaggatcacggctatgcgctgactggtgatgcgctntctcaggcggcgattgcggcggcaaaccgttcgcacatgccttacagtaagtcgccaagcggtgtcgcgctggaatgtaaagacggtcgtattttcagcggcagctacgctgaaaacgccgcattcaacccgactctgccaccgttgcagggagcgttaattctattgaatctcaagggttatgattacccggatatccagcgcgcagttctggcagagaaagccgatgcgccgttgattcagtgggatgccacctccgcaacactgaaagctctcggctgtcacaatatcgaccgcgtgcttntcgcttaagcctggtgccggatgcggcgtgaacgccttgtccggcttgccagccctctcctggtgtcgaaaatcccggcaaacagnnnnnnnnttcttgcgcaaaaccagcgggtaaagtagcctgatggaaattttccttagatcgagtctcctgcatgttaaagcgcgtgttcctcagcctgttagtcctgatcggcttgctgctgttgactgtgctcggcctcgatcgctggatgagctggaaaaccgcgccttatatctacgacgaattgcaggatctcccctaccgccaggtcggtgtggtgctcggaacagcaaaatattatcgtactggcgtaattaatcagtattatcgctaccgcattcaaggagcgattaatgcctataacagcggtaaggtaaattatctattactgagcggcgataacgcattgcaaagttataatgagccgatgaccatgcgcaaagatttaatcgctgctggtgtcgacccatcagatattgttctcgattacgcaggctttcgtacgctggattccatcgtgcgtacacgcaaagttttcgatactaatgatttcattattatcacccaacgtttccactgtgagcgggcattatttattgcgctgcatatggggattcaggctcagtgttatgccgtaccgtcaccgaaagatatgctgtcagtacgtattcgtgaatttgccgcccgtttcggtgcgctggctgacctttatatttttaaacgtgaaccgcnttttttagggccgctggtccctattccggctatgcaccaggtgccggaagatgcgcaggggtatcccgccgtcacacccgaacagttacttgaattacaaaagaaacaaggaaagtagttatggatgtacagcagttttttgtcgttgccgtttttttccttatcccgatattttgtttccgcgaagcatggaaaggctggcgcgcaggcgcgattgataaacgggttaaaaatgcaccggaaccggtgtatgtctggcgagcaaaaaatcccggactctttttcgcttatatggtggcatatatcggcttcggaattttatctatcggcatgattgtttatcttattttctatcgttaatattttctcttttctgttaattattgagaataattattacttcactcaataagctgcggatataacattctgaaccgcagctatttgtgaatcctttcacagtttaaatttccccacgcgcatagccttaatatcagcacgcaatatttatttagcgttcgccttaattactcatagcattaaggaagatcacatgccgcaacaaaattatctggatgaactcactccggcttttacgccgttactggcgattaaagaagcctctcgctgtttattatgtcacgacgctccctgtagtcaggcttgcccggcacagaccgatccggggaaatttattcgctcaatctactttcgtaattttaaaggcgctgccgagacaattcgcgaaaataatgccctcggtgccgtttgtgccagagtgtgcccgacggagaaattatgccaaagcggttgtacccgtgccggtgttgatgctcccattgatatcggccgcttacagcgttttgttactgattttgaacaacaaactgggatggaaatttatcagcccggtactaaaacgctcggcaaagtcgcgattattggcgcaggtcctgccggattgcaggccagtgtgacgctaacaaaccagggttatgacgtcacgatttatgagaaagaagcgcaccccggtggctggttgcgtaacggtattccgcaatttcggttaccgcaatcagtgctggatgcagaaatcgcccgtattgaaaaaatgggcgtgaccattaagtgcaataacgaaatcggtaaaacactcaccctggagcaactgaaagcggaaaaccgcgcggtactggtcaccgtggggttatcaagcggttccgggctaccgctgtttgagcatagcgacgttgagattgccgtcgacttcctgctacgtgcacgacaggcgcaaggcgatatcagcattccacaaagcgcattaattatcggcggcggtgatgtcgcaatggacgtagccagcacgctgaaagttctcggctgtcaggcggtaacttgcgtagcgcgtgaagagttagatgagtttccggcaagcgaaaaagagtttgccagcgcccgggagctgggcgtttcgatcatcgatggattcacgccagtagccgtggaaggcaataaagtcacgtttaagcatgtacggttatcgggcgaactgacgatggcggcagataaaattattctcgccgtcggtcagcatgccagactggatgactttgcgaagttagagccgcagcgtaacaccatcaaaacacaaaattatcagacccgcgatccgcaagtctttgctgctggcgatattgttgagggtgacaaaaccgtggtctatgccgtgaaaaccgggaaagaagccgccgaggcgattcatcactatttagagggagcttgctcatgttaacgaaagatctttcgattactttttgcggcgtgaagtttcccaacccgttctgcctctcttcttcgccggtaggcaactgctatgagatgtgtgccaaagcctacgacacaggttggggcggcgtggtgtttaaaacgatcggcttttttatcgccaacgaagtctcgccgcgttttgatcatctggtgaaagaagataccggttttatcggcttcaaaaatatggaacagattgctgaacatccgttggaagagaatctggccgccctgcgtcggctgaaggaagattacccggacaaagtattgatcgcttcgatcatgggggaaaatgagcagcaatgggaggagctggcgcncctggtgcaagaagctggcgcggatatgatcgagtgtaacttctcctgtccgcaaatgacttctcatgcgatgggtagcgatgtcgggcaaagcccggagctggtagaaaaatattgtcgggcagtgaaacggggttccacgctgccaatgctggcgaagatgacgccgaatatcggtgatatgtgcgaagtggcgctggcggcgaagcgcggcggcgcagatggcattgcggcgattaacaccgttaaatccatcaccaatatcgatcttaatcagaaaatcggtatgccgatcgttaacggaaaatcgagtatttccggatattccggtaaagcggtaaaaccgatcgccctgcgcttcattcagcaaatgcgcacccatccagaactgcgcgatttcccaatcagcggtatcggcggcattgaaacctgggaggatgcggcggagtttttattgctcggcgcagcaacgttacaggtcaccaccggcattatgcagtacggctatcgcatcgtagaagatatggcgagcgggttatcgcattatctcgccgatcagggatttgattcgttgcaggagatggtaggtctggcgaataacaatattgtcccggcggaagatttagaccgcagttatattgtctatccccgtatcaatcttgataaatgtgttggctgtggacgctgttatatttcctgttacgacggcggtcaccaggcgatggaatggagcgagaaaacccgcacaccgcattgtaataccgagaaatgtgtgggttgtctgctttgtggtcacgtctgcccggtgggttgtattgagctcggggaagtgaagtttaagaaaggcgagaaagaacacccggtaacgttgtaaaaccagagacgcatccggcatttggttcctgtcgccggatgcggcttgaacgccttatccggcctacaaaaccatacaaatcagtatgttgagctcattgtaggccggataaaacgcgccagcgttgcatccggcatttggctncnngtcgccggatgcggcgtganngccttatccggcctacaaaaccacacagatcatgatgttatgtgcgtttatgaccgaatgcggaccacaatcatttcacttcttacgcgcgtacttcagtgaatccagcgctacggcgaagataataatcgcccctttgatgatgtactgccagtatgggtttacgccgatgtacgtcaggccatanttgatgacggtaaaaataattaccccggtcaccacgccaatcaccgtccccacaccgccgctgaacgatacaccgcctaccacgcacgccgcgatagcatccagttcatacataaagccgaggttgttggtggcagagccgatacgtccggcttctaacatcccgccaaaggcatagaacacgccagacaacgcgtagatcatcagcaggttcaggccgacgttgacaccagatacttttgccgcttccgggttaccgccaatggcaaaaatgttcttaccgaagcgggttttgttccacaacacccagacgaacgccaccgcaatcaacgcgtagaaggtgatgtaagagagacggaaactccccagcgcgacaaagccctgagcaaaggtagagaagccactgtcaaaaccagaaattggcgacgccccgacaaagtcgtaataaagcgagttgatgccatagacgatgatcatcgtgccgagcgtggtaatgaacggcgtcacgttgagataagcgataatcagaccgttgatcaaaccgatcaccgcaccaatggcacagacaatcagaataaccagcgcaatcggcatcgtcgccatttccgggaacactttgttggcgttatccatggactgcaataatgtcgctgccaccactgccgccagccctacttgacgccccncagaaaggtcggtcccctgggtgacaattaaccctgccacaccgagcgcgataataatacgcaccgatgactgggtgagaatattacttaagttcaacagacttaaaaatgttggggcctggaaaataataatcgcaagcaaaactaaaagaacgacgtaaataccgccctctttcaggtaagtaagaaaacttttcttatttaacgcactcatgggaagcccctaatcttaaaggtgcaaagacgcaagacgtagaatttcgttttgcgttgttgtttttgtatcgacaattccggaaacgaggccattgctcataaccagaatacggtctgttatccctaacaactctggcatttcagaggagataataataatccccttgcctttcttcgccagttcggcaattaactgataaatctcaaacttcgccccaacatcaataccgcgcgtcggttcatcgancattaatatttctggttgcgttaacagccagcgcccaataatcaccttttgctgattaccacctgagagcgaaccaatttgcgtccgatgccccggtgtttttacccgcatcgaatcaatcacccactgggtatcgcttttcatccgcgagttatccagtaaaccaactttatttttgtagttgcgaatattggaaattaacgagttaaaaccaatatccagataggcataaattcccgttgagcggcgctcctcagttaccagtgcaaatccgtggtttatggcttcgttggcattatggttattgatctttttgccgtgcaacgtaatggtgccagccgatttctcgcgaataccaaataacgtctcaacaatatcggtacgtttcgcccccaccagaccggcaataccgaggatctcccctttatgcagatcaaacgagacatcgcgaatcgacggctggcgcagtgacgtcaggttacgtacctcgaggatgacttcgcccggcttgttttctttgtcaggaaaacgctggttaagagaacgcccaaccatcatggcgataatcttgtccatcgtcagccctgccagcggttcggtggcgatccactgaccgtcgcgcaatacggtaacttcatcacataactggaagatttcctccattttatgcgagatataaacaataccgcagccgcgctcttttaatttacgaataatagtgaacagatgattgacctctttttcggttaacgaagaagtcggttcatccataatcacaattttcgcgttataggaaaacgctttggcgatttcgatcatctgcatttgcgaaacagataatgtgccgacgcgcgcacgcggatcgatatcaatatccagttcatcaaaaatcgctttggtttcgcggtacattttgtcctgatcgacaaacatgcctttggtggggtatcgcccaagccacatgttgtccatcaccgaacgttgtaataccaggtttaactcctggtgtaccatcgaaataccattttccagtgcttctttggccgaatggaaatcgatctctttaccctggaataaaatggtgccggagtcttttttataaataccaaacaggcattttaataatgttgattttcctgcgccgttttcccccattaatgcatggatagaatgtggccggacttttaaattaacgttatcaagtgccttaacaccaggaaaagacttgttgataccgctcatttccaacaagtattccccggaagacggagtcgttgagctgaccatataattttaccttgttggccatacaataagggnnnngtaatagactgcgcccaatcagtcttatttcttgctgaattcagccaggttgtctttatctacgccaacataaggtacgcggaccactttgttgtcgattttccagttggtgccatcagccgcacctttaccatcggccaggtttttcgccagatcaaaggtcgctttcgcctggttgttagcatcgttcagtacggtgcccgccagtgcaccggatttcaccagcgccagcgcttctggcagagcatcgacgccaaacaccggaatgctggacttgttgtgtgctttcagtgcttctaccgcgcccattgccatcgcatcgttgttggcgataaccacttcgattttgttggcgttcgggccagacagccaggcgtccatcttatctttcgcctgagcggtatcccacatagcggtatctaactgtaactgttcagttttaatgcctttgtcgttcagctctttaatcacgtaagtggtacgtgcttctgcatccggatggcccggttcacctttcagcagtacgaattgaatctgaccgtctttattcagatcccaaccctgattcgccgcccagtgtttagcaatcaaatcgccttgaataatgccggactctttggagtcagtgccaacgtagtaggctttgtcgtagctatccagcgccttacgagacggttctttgttaaagaataccaccggcacattttgcccacgcgctttctcaatcaccgtacccgcagctgccgggtcaaccaggttgattgccagtgccttcacccctttcgccagcaatacgtcgatctgatcgttctgcttggactggtcattctgtgaatcattcatcagcagctgaacatctggcgcggctttcgcatcttgctcaatagccttgcgcactacagacataaagttatcgtcgtacttatagattgttacaccaatgcgagtatcagcagcgtgtgcagtggcaccgaataacatgctggccatcacagcagacagggttaacaccttcttattcatggtatctccggtttttcttatgcagggtagtgcttgagataaatgctcggcggggcagtagagttaatgaagtgttactgaacgccgaagctcactttttaaaattcgttcttccatgcccggtaacgctccagaaaacggctttaattgttgttatgacnnnntacctcggtgaaagtgattattcactgttacatacgggttacaacgttaaaacggtgcaatcatagctatcacattgttaagatnnnnntganatcactcacagattgaaagcggttacatcgcctgatttgttgagttagtgatcgccgccgcattctggcgtgttgcgacagaatggcgacgcactaacgtcggcataaaacagtggctggcacgaggatcaatattgcctgctgccccctgcaaggccagttcggtggctaatttcgccattgaagcaatgggataacgcacggtcgttaattgcgggtcggtgtaacgggcgatgggaatatcatcgaaaccgatgattgagagatgtaacggaatcgcaatgccattatcttttaatgctgtcagtgcgccagcagccatattgtcgttataagcaaatacagcggtaagttgtagattgcgccccagcagttcaaccatcgccgcctcaccgcccggcatgtccggcgtaccagtgccaatccagctttccggcggaataatatcctgctctttcaacgcactcatccagcctgctttacgcatggcgtcatcttcaatgccgtggctggaagaaagataaccaatacgttgatgaccgttattcagcaacatgcgcgtcgccattcgggcaccgctgagattatccaggcaaacgcaacgatgggtgtaccccggcacaacgcggttgattaacaccataccgggaatgttatccataaattgcgccagttcatcgtcactcaatgcttttgagtgaacaatcaacgcattacaacgctggcgaattaacacctcaatggcgtgacgctctttttccgcttcatgatagctattgccgattagcacgtatttctgatgctgctgagcgaccagatccaccgcttttaccagcgcgccgaaaaacgcatcagaaacgtccatcaccaccacgccaatggtgtcgctaacctgagttgccagcgcctgggcattggcgtttggccgataatccagctcactcacggctttcattactgcttcacgcgtgtcggcactgaccagcgtgctgttattgagcacccgggaaaccgttgccacagagacgccagcctgacgcgctacatcacgaatggtgatcatattcactacctgttatgagattgcagtaaatgactgcttgctgccggctattttgtcagcactgaatacaggacttcgtgaatcgagtcacagcaatggaaacggttacagccgttttgttaacgaatgtgatccagatcgttatcttgatgttttagatattgccggtccggcagcacgcaaagttaactgacgccagagccattccacaggcccctggcggaagtaacgcagccagataacagagaagagaatattcgccagccataccggaataacaaacgccagcaattccagacggtcaaactgcataaacagaccgaggtggtaaaaaagcgtggtacaaatcagcgtttgcaatagatagttggtcagcgccatccgtccgacgcaggcgatcgccagcaccagcttaaagcggctcaattgcggccagaagccataaaacagcgacgcatagccaatcgcctgaaacggcgcactcagttcccgcggcatttgaagtaagaaggcacaccagcgatacgcccagtccagctgccattgcagggcgatggcaggaaggtttatgatcaccccaatcgccactagcacaaaaccagtacgacgatagtgacgtaagctgaactgccctttcagccagccactgcgcatcaatgcggcaccaatgagcatcatcccagccagttgccagccatactgtgcgcccagtgccaataaactgttcccaacaccatcggcacgattactgatcgcttcaacgccgccgtgaagcttccagtatttttcatnnnnnnnnnccgatgcatccggcgtccaggcgcggctagtctggctatcggaaatcaaccccaataacagcaaaacgccaagccccaccagataaagcatgacgccggtattaaaaaggctttttaccgatggcgcatcgcgcaccagccgccagcagattaagcccaccagcccgtaagccagcagaatatcgccgtcccagaacaataaaccgtgaataaagcccagcaagactaacagcgttaaccgcgactggatccagcgtctgccacggggcagcaacatttgcaggccagcaccaaacagcagcgcaaaaagcgtgaggaatttcacctggccgatgagatcgagaaatgcccaggtccatgcatcctgcggcgtaatagcgccgtaccaggcgggattaagataagccgcctttggtagcccaaaggcgctgatgtttaatagcaggatccccagaatggcgacgccgcgaacaaagtcgagcgtgacgttgcgctccatggttcctgcctttaaatcagttgtgatgacgcacagcgcgcagaaactcgtggcgcgtattctgactggatttgaacaatccaccaagagaggtcgttgtcgtggcactggttgcatcgcggatgccacgcgccttcacgcaataatgcaccgcgtcgatagagacagccacgttattggtgcccagcagcgtttgtagcgcaatgagaatttgctgcgtcagacgttcctgcacctgcggacgctgggcaaagaactgcacaatacggttaatttttgacagaccgatcaccgaatctttcgggatataagccaccgtcgctttgccatcgatggtaacaaaatggtgttcacaggtactggtcagagtgatatcgcgcacggtgaccatttcatcgaccttcattttgttttcaatgagggtgattttcgggaagttggcgtaatccagaccggagaaaatttcatcgacatacattttagcgatgcgatgcggcgtttccatcaaactgtcatcagccaggtcgagattcagcagctgcatgatttcggtcatatgaccagcaataaggcttttgcgcgtttcgttatccatttcatgcacgggcgggcgcagcggtgtttccagtcctcgcgcaactaacgcttcatgaaccagggccgcttctttactgagtgatggcatttatgatttctcctgcaggtgtgacgcctccgccctgcgtgggggcaaagttattaagctgatttacagcctgattattgtgcgtgaggcggcgcacataatccagtattcacagcgataattattgtaattgccgctgcctttcatcagcagatgttaaaacatcgttatgcaaatacggaagtgaaagttactcacagcacattgaataaacggtatgatgaagaaattgcaaacaacacaacaaggagccacgcatggaaatgctcgaagagcaccgctgttttgaaggctggcagcaacgctggcgacacgactccagtaccttaaactgcccgatgacgttcagtatctttctcccaccccctcgtgatcacaccccgccaccagtgctgtactggctttccggattaacctgcaatgacgagaacttcaccaccaaggcgggtgcccagcgcgtggcggcggaactggggattgtactggttatgccagacaccagcccncgcggcgaaaaggttgccaacgacgatggctacgatttaggccagggcgcaggcttttatcttaatgccacgcaaccgccgtgggcgacgcattaccggatgtatgattatctgcgtgatgaattaccggcgctggttcagtcgcaatttaatgtcagcgaccgctgcgctattagcggtcattcaatgggtggtcacggtgcgctgattatggcgctgaaaaacccgggcaaatacaccagcgtttcggcctttgcgccaattgtgaatccgtgcagcgtcccgtggggaatcaaagcgtttagccgctatttaggtgaggacaaaaatgcatggctggaatgggacagttgcgcgctgatgtatgccagtaacgcgcaggatgcgatcccgacgcttatcgatcagggtgataacgatcagtttcttgctgaccaactgcaacctgcagtacttgcagaagccgcgcgccagaaagcatggccgatgacgctgcgtattcagccgggatatgatcacagttactacttcatcgcctcttttatagaggatcacctgcgcttccatgcgcagtatttactgaagtgaaagtccgcccggttcgccgggcatcttctcatcagaagcgataatccactgccataaagtaacgacgtccgtcttcgttatagctgtagtcgtcacgactgagatccttgtcgccaaggttcagcacgcctgcgcgcagtttgacgtctttagtcacctgccaggccgcgccggtattccagatggtataaccgcccggtgttttagccgtcgcgctgtcggctcgtttctgcccggtatagtgaccagaaacatagaatgaccagtcttccagcgccagcggtttccagtccagcgtaccgttagcggtatggaacggcagatcggatagcggtttgttttcgccgttgctgacatcacgaccatcgttgtaggtgtagttgagtgacagtttccattcatcgttgaacggaattttcagctcggtttccacgccctgaatacgtgctttgttaacgttgtagtagctaaataccggcacaccgttcgctgtaaaaccaacaaagttttggtagcccggtgcagcattgacgtcagacgtacggctgatgctgatacgatctttcacatcgttacggaaaacggtaacgctggattcaaccccttccagccagccttcttcacccatgtagtaaagccccagctcccaactttcgctggtttctggtttcagatccgggctacccacaatcttacatgcgccacggcaggaattgctcgtccagtcagggctaagttgcaacagagaangtgctttaaatgccgtcgcccagccccctttcaccgttacggtgtcggtggcgttataaaccaggtaggcacgcggactccagtgttcaccgtaggtttcgtgatcgtccatacgcacgccggtcgtcagcgccagcggctcgaagatccgccattcatcttccacaaacagcgcgtactggctggcagacgttttggagctggttcccccggtcaggttcaccgcatcgctaagtttgtcgtgacgccattcaccgccaaccgtgagaaactgattaatcgccgtcagcggcaacgtgtatttgccgtcgaccgtattgctttcggaagttatcgggctgctgttgccagggtttttgttctcgactttctcaccgtagtatttcagttcgctggtgccgtaatcccaacgcccattatggctgacggagtagttctggcgttccaggcggtttttgtccagcgagtcggaatcacgatcctgacggtcgaaaccgtatccggcagtaaaatcgtgattttgattcggtgtccaggcaaattcgacattgccgtcgcggctggagaatccttcaatacgcggcgtttctccggtatcggtggtcgttgagttttgcgggtcatccttttcacgttttgccaggctgccgtaagctttcattcccagcacaccatcaattaatggtccactggtaaagaactgaccgttataggtatcaccgcgatcgcgatgttcctgaatggtggtatcgacggtaacggtacccgaccatttctgaccgatttttttggtgatgatattcactacaccgccgagcgcatcggaaccgtacagcgacgacatcgggccacggaccacttcaatacgttcgatggaatcgaccgggatccagttcagatcgaaatcattgtggcggaagacggcattgcgggagttaacgcgtttaccgtcgacaagaatcagggtgtagctgctgtccagaccacgaatactaacgcccttacggttatccccttcgttcgtcagttgtacgccaggcacttctttgaggacatccttcagattctgtaccggttttcgctgcaggtcttcctgggtaatgacgctgatactggcgggtgcatctttaaggttttgttcaacggaagatgcagtgacaaccatcgtttcgccatcgtcatcgaccgctaacacaggccatgcacaagaaatagcggacaaacacagcccgacccgtacgaaagggttcaacctaaacattccatatctccatgaggtaactacgaaaataaaatgggttatcgctcacatcttcttcacgtccccttgcgtacggcagcatcgcggtggacttatttgtatgcaggtgatcatcccagaaagccggaccagcctctgatttgtcagccttttttgattgcggcgtaacgataatgcaaacgataacaattatcaatccaaatgttaaattttatatccgcatgatttgtcagggaaatggaattgaaaaagccctctcggttgagagggcttagcaaggaagggagaaacttatttcttatcgttctgcgggaacttcatttcgctgtagcgtacgaagtgggttcctttaataagcttgtagccgaaccaaataatcaggaacagcgggataccaatatacgttgccgctacgccgccccagtcaatggtatctttcaggaacgcttcgtagttctggcccaaagtgataatcagacacagaatgaatgcgaagatcggccccaatgggaagaaacctgaacggtacggcagatcgttaatgtcgtgtccctgcaatacgtaaccgcgacggaagcgatagtggctaatggcaatccccagccaggcgataaaaccggtcatcccggaggtattcagcagccacaggtataccgtctggttgccaaacatggaggtcaggaagcacagaccggcaatcaccgtcgtcgcatacagcgcattacgcggcacgccaccacgcgacagtttagcgaaaatgcgcggcgctttaccgtcacacgccagggtgtacagcatacgagtagacgcatacataccggagttacccgctgacagcaccgccgtcagaataactgcgttcatcaccgccgcagcagagagcagacccgcgtgctggaacaccagggtgaacggactaacgctgatgtctttaacatcgttacgcagcaggctcggatcggtgtacggaataatcaggctgataatcaggatcgcgaacacatagaacaacaggattcgccagaacacctgacgtaccgcgcgtggaatgtttttccccggatcttcggactcgcctgcagcaataccgatcagctcggttccctggaaagagaagccgacaatcatagctacgccgatcatcgccgcaaaaccaccagcaaacggcgcttcgccgattgtccagttgctccagcccgcaggctgcgcgcctttgaagataccgataatcatcagcacgccaacgatgataaagacaataactgtcgtgactttgatcagtgagaaccagtattccgcttcaccaaagccgcgaacagagatgtagttcagcaggaagataacgccgaggaacaacgcactccagatccagcccggtgtatccgggaaccaccagctcatgaccagctgagctgcaaccaggtcaacggcaatagtcaccgcccagttgtaccagtagttccagcccagcgcgaagccaaagccctcttcaacatagttctgaccgtaagtggcaaacgaaccggaaaccggcatatatgcagccagttcaccgagactggtcatcaggaagtaaaccatcaggccaatcnacatatacgagagcaatgccccgcccggacctgcctgagaaatcgttgcgccagaggcaacaaaaagacctgtaccgatggaaccgccaatggcaatcatcgtcaggtgacgcgcctttaattcacggcgtaagcccggcgcttctgtggttttagtttcggaaaccatacaaaaatgctatccatctaaaaaatgaggcgcgattgtagcagacgattggcaatccttccggcagaaatacacggttataagacaccttcatgatcgcccagggattataagtaaagcagccaatctcttttctggcgaatgcatgctgaaggcgctgcgtcacgaaatcgacacagcaccagcatgttcttgtacagcaacttaacgcggcacatttgcgggatcgcaatagtccagaaagcgccgtagcgcgttggaaaggtgtttttgccgatgatgtatacgccacaacgtacgcatcaggcgcggcagagggaccgcaacttcacttaatgtgcctgcctgcaattgatcttcaatcacacgtcgcgacaggcaactaattcccaacccatgacgcaccgcatgtttgattgcctcggagttacctaattccatcgccatctcaaacttcggtaaatgtgacagcaacagataatcgacaatctcccgcgtgccggaaccgcgttcacgcaggatccacggcgcagcggccagctgttctaaggtgaccggaccacgggccaacggcgaagtcggcgcggcgaaaaccaccagctcgtcttccagccacggttcagaaatgatttcagtgctgtggcacggtccttcaataaagccaatatcaacgcggaaatccagcaccgcttgcatcacgtcctggctattcccaacgctaagttcaatcggcaactgcggataatcatggcgataacgggcgataactgcaggcagaatgtagttaccgatggtactactggcatagatacgaatcgcgccgttgtcttcgcgaaacagttgttcgatttcaaccgcctgttcaagcaatgccaacgcacgcggatagagcagccgcccgtgttcattaacaaccagtcttttccccacgcgatcaaacagttgcacgccaagctgcccttccaggtcggtcaaggctgcgctcactgctgattgcgacaacgccagcatcaccgacgcttgggtggttgatccacttttcaatacttctgcaaaaacttccaactgccggagggtgatgtgcatagtcgcttaccacttataaagattaattataaatatataatcaattttatttttaaaccagttagtcgtaaccttatgcccggttaaaggagagggttatgacgaatatcaccttacagaaacaacatcgtacactgtggcattttattccggggttagccctgagtgcagttatcaccggggtcgccctgtggggtggttccattcccgcggttgcgggtgccgggtttagtgccctcaccctcgcaatcttgttggggatggttttaggcaacaccatctatccgcacatctggaaaagctgtgacggtggtgtgctgtttgccaagcaatatttattacgtctgggtatcattctttatggcttccgtctgacgttctcgcaaattgccgatgtcggtatcagtgggatcatcattgacgtgctgacgctgtccagtaccttcctgctggcttgcttcctggggcagaaagtgtttggtctggataagcacaccagctggttgatcggtgccggtagcagtatctgtggtgctgccgcggtactggcgactgagccggtagtgaaagcggaagccagtaaagtaaccgtggctgttgcaaccgttgttatcttcgggaccgtcgcgattttcctctacccggcgatatatccgctgatgtctcaatggtttagtccggaaactttcggtatctacattggttctactgtgcacgaagtggcgcaggtggtggcggcaggtcatgccatcagcccggatgcggaaaacgcagcagttatttccaaaatgctgcgcgtgatgatgctggctccgttcctcatcctgctggcggcgcgtgttaaacagctgtctggggcgaacagcggcgagaaaagcaaaatcactattccgtggtttgccatcttgttcatcgtagttgccatctttaactcgttccacctgttaccgcagagcgtggtgaacatgctggtaacgctggataccttcctgctggcaatggcgatggcggcgctgggtctgaccactcacgtcagcgnnnnnnnaaaagctggggcgaaacntctgctgatggcactggtactgtttgcctggctgattgttggtggtggtgcgattaactatgtgattcaaagcgtcatcgcataaaccactacatcttgctcctgttaacccgctatcattaccgttttcctccagcgggtttaacaggagtcctcgcatgaaatacattggagcgcacgttagtgctgctggcggtctggcaaatgccgcaattcgcgccgccgaaatcgacgcaaccgcgtttgccttgttcaccaaaaaccaacgtcagtggcgtgccgcaccgctcacgacgcaaaccatcgatgaattcaaagccgcctgtgaaaaatatcactacacatcggngcaaattcttccccacgacagttatctgattaacctcggacatccggtcactgaagctctggaaaaatcgcgcgatgcctttatagatgaaatgcagcgttgcgaacagctggggctttctttgctcaacttccaccctggcagccatctgatgcagatttcagaagaggattgccttgcgcgtattgccgaatccatcaacattgcgctggataaaactcaaggtgtgacagcggtgatagaaaacaccgccggtcagggcagtaacttagggtttaaattcgaacatctcgcggcgattatcgacggcgtggaagataaatcccgcgtcggcgtctgcattgatacctgccatgctttcgctgccgggtatgatttgcgtactccagccgaatgcgagaaaacattcgcggattttgcccgtactgtcggctttaagtatctgcgcgggatgcaccttaacgatgcgaaaagcacctttggcagccgcgttgaccgccatcatagcctcggtgaaggcnatatcggtcatgatgcgttccgctggatcatgcaggacgaccgtttcgacggcattccgctgatcctcgaaaccatcaacccggatatctgggcagaagagatcgcctggctgaaagcgcaacaaactgaaaaagcggtagcctgaagatgaataaccgggaaaaggagatccttgcaattttacggcgtaacccgctgattcagcagaacgaaattgcggacatgctgcaaatcagccgttcgcgcgttgcggcgcatattatggatttaatgcgcaaaggccggattaaaggcaaaggttacattctcaccgagcaggaatactgcgtagtggtggggacaatcaatatggatattcgcgggatggcggatatccgttacccgcaatcggcttctcatcccggtacaattcattgctcagcgggcggcgtgggacgcaacatcgcccacaatctggcgctgttaggccgtgacgtccatttgctttcagtgattggcgatgacttttatggcgaaatgctcctggaagaaacgcgccgcgccggcgtgaatgtctccggctgcgttcgtttacatggtcaaagcacatcnacgtatctggcaattgccaatcgagacgatgaaaccgtgctggcgattaacgatacccatctgctggaacagttatcgccgcaattattgaacgggncgcgcgatttacttcgtcatgcgggcgtggtactggctgattgcaacctgacagccgaggcgctggaatgggtctttaccctcgctggtgagatcccggtgtttgtcgataccgtttcagaattcaaagcgggcaaaatcaaacactggctggcgcatattcacaccctgaaacccactttaccggagctggaaattttatggggacaggcgatcaccagcgatgctgaccgtaatgctgcagtgaatgcgttgcatcagcaaggtgttcagcaactgtttgtttatttgcccgatgagtcagtttattgcagcgaaaaggatggagaacaatttttgctgaccgcaccagcgcatacgacagtagacagttttggtgctgacgatggttttatggcgggcctggtatatagctttctggaaggaaacaatttccgtgacagcgcccgttttgcgatggcctgcgcggcaatttcacgcgccagcggcagcttaaacaaccctaccctgtctgccgataacgcgctttcattagtgccaatggtgtaacaatgttgccggattcgacgcttgaccgcatcttatccggctcataaatcgcacactacgctaaaccaataaagaacccggcaatggtggcactcatcaggttagaaagtgtcgccgccgccagcgcgcgtaaaccaagctgggcgatttccggcgcacggtgtggcgcaaccgcagaaaacgcccccaccaccaccccgatagaaccaaagttagcgaaaccgcacaacgcgaaggaaataatcgccacggttttagcatccagagtgccagccgtttgcagatagggtgagaaattgagataagcgacaaattcatttattgccagtttctgtccaatcaaactcccggcaagattcgcatcactccagtcaacacccattacccacgccagtggggccagcagataacctacaatggactccagcgaggcatgttcaaaaccaaaccagccgccaacgccgccgataataccgttaattaacgcaatgatggcgacgaatgccatcactactgtcgccacacctgcggcgattttcagcccggtcattgcccctgtcgcggcggcttcaataatgctttttggcggtgtttcggtgaaagagaggttattaaaagaaacctgcgaagattccgtagccgggcttagcaggcgggcaaacaagatccccccggggatcgccattaacgatgccgccagcaaatattccacaggcacgcccagtgcggcataaccaatcattgtcgaaccagcaatcgaggccatgccgctacaaatcgctgtaaataattcattgcgattcagccgatcgataaagggcttcacaatcgccggaatttcgttttgcccgaggaaaatggtagtgaccgcgacgaatgactcaatcttgctgatatttaatgctttctggaatataccgccgagaatgcgaattaaaatccccatcacaccgatgtagtagagaatactcaccagtgcagtgacgaagataattgccggtaataccctgaaaccaaagataaatcctgcgccatcaaataaggtgtccattttcggtccgaccagagaaccgaagataaatgcgctacccgcgtcgctgtacgccatcactttatgcacgccaaaagcgactttttcagcgacccaacgccctggcggtaaccaaagcataatgccgccaatcacgacctgtaacactaacgccgcgccaacggtacgcaggctgatcttcttcttgtttactgacagtaaaaacgcaatcgtcagcaataccaccattcccagaacacttctcatgacatccatagtgattatctcttcatgtcatattgggcgacggctttctgcccatcagaaatagccaggcctgcatcttgcgataccggcccggcttgttatcaacacttaatgggttttgatgtagccgcgcacgcactcttcgactaagccccagaaccagtcggtatcaatagtgatgccgactttggtattagcgggcttgccaagaacgcccagctcgtcgcagacggtacgcccataacaagggccactgttgacgtccacttcgacgtacatctcctgggttttaatgccatcagggttaatcagataaccgatgcaggtggcgtcgtgcaccgggccgccagccaggccgtagttttcgaactgggttttgagagtgaagttcatgatgtcgctgaacagctctccggcagggccgcctgccctttccattcgtgcaatcacgtccggggtgcaaacggtctggttggtgagatcgaggcccatcatcactaatggaacgccagaggtgaacaccacgcgtgcggcttccgggtcagcaaagatgttgaactcggcagatggcgtgaagttgcctgtaccgtaagcgccgcccattagcacaatttcacggattttgggcaggatcgcgggttgcatacgcattgccaccgcgatatttgaaagcggaccaaccggcaccagagtgatatcgccatcgcttgccatcagggtatcaatgatgtatttcaccgcatgagtgctttctgcctggcgggtcagcggctcgaataccgggccatccagtccggtatcaccgtgaatattatcggcaacgatttgttgccgcataatgggttgtggcatccccgcataaaccggaacattaatctccagtttctggcaaacattcaggccattaattaatgttttatcaagcgtctgattacccgctacaatagtgatgcctaataaatctattgccggatgtttcgccgccatcattatagcaatagcatcatcatgacccggatcacaatccagaataatttttctcttttccattgtttatttcctctgtttccagttgcgttattttttctacagcaaagaaatttcgatcgggccgatgattgaatcttaacaacagcgtacgtatgctaaatatgagaaatctcatagcggataaacatcgtgaaagaaatccacaataatgatcttaagcagcaattgatgagtgaatccgcgtttaaggattgctttttaacggatgtttcagccgatacgcggctgtttcattttntagcgcgtgactacattgtgcaggaagggcaacagccgtcctggctgttttacctgacgcgaggccgcgccaggctttacgccacgctagctaatggtcgcgtgtcgctgatcgatttctttgccgccccctgttttattggtgagattgagttaatcgataaagaccatgaaccgcgtgcggtacaggctattgaagagtgttggtgccttgcgctccctatgaaacattaccgtccgctgttattaaacgacaccctatttttacgaaaactttgcgtcaccttaagtcataaaaattatcgtaatattgtttctttaactcagaatcaatcatttccgttagtgaatcgcctggcagcatttatattactctcacaagaaggtgatctttatcacgaaaagcatacgcaagcggcagagtatttaggcgtttcttatcgacatcttttatatgttctcgcgcaattcattcacgacggtttattaattaaaagcaagaaaggatatctaattaaaaacagaaagcagttgtcagggctggcactggagatggacccggagaataaattctccgggatgatgcagtaaaaattatttgcaatagcgcgattgccggatgcaacgcttgatgcgttttatccggtctacaaattgagcattacgccagaccaataaagaacccggcaatggtcgcgctcatcaggttggaaagcgttgctgctgccagcgcccgtaaaccaagctgagcgatttccggtgcgcgttttggcgaaatagccgaaaatgccccaacgacaacaccgatagaaccaaagttagcaaaaccacaaagcgcaaaggagataatcgcaatggttttcacttccagcgtgccgcccgtttgcaggtatggggagaaactcaggtaagcgacgaattcgttaatcgccagtttctgcccaatcaggctacccgcaaggttggcatcactccagtccacacccatgatccacgccagcggtgccagcacatagccaaaaatactttccagagaagcattggcgaagccaaaccagccgccaattccgccgataatgccgttgatcagcgcaataattgccacaaatgccattaccaccgtcgccacaccagcggcgattttcagcccggtcatcgcaccgctcgccgctgcttcgataaagctttttggcggcgtttcgctgaacgacagattttcaaacgtgacctgcgaaagctcggttgctggactaagaatacgtgcaaacaaaataccgccggggatcgccatcagcgatgccgccaacaggtagtcaattggtacgcccattccggcataaccaatcatcatcgaaccagcaatggacgccatcccgctacaaatagccgtaaacaactcgtttcgattcatgcgatcgataaacggtttaacgatcgccgggatctcattttgcccgaggaaaatagtggtgactgcgacaaaagattcgattttgctgatgttgagggctttctggaaaatgctgccaaggatgcgaatcagcagccccatcacgccaatgtagtacagcagactaatgagcgcagtgacgaagataatcgccggaagtacgcgaaaggcgaagataaaacccgcaccgtcaaagaggacatccattttcggcccgaccagcgaaccaaaaatgaaggcgctaccagcatcactgtaagacatcactttatgaacgcctaatgccgcctgttctacagcccactttcccggcggaaaatagagcatgatgccaccaagagcaatttgcagcagtagtgcggctgcaaccgtacgcaaactgatgctctttttattcactgacaacagaaatgctattgccagtaacaccaccatccccacaacacttctcattatgtccataatgattttcccttcatgccagtaaacccggcgtcagcgccaggtttcggtatgtttgatgagtacgggcgacggctttctgcccgtcagaaattaacccgcgagacgctgatattctttggcaatttcgctcgccagaatggcgttgttgaacacaagctggatgttggatttcaggctgtcaccgccggtcagctcagcaacgcgcgccagcaggaatggcgtactttctttaccaataacaccctgcgcttcagcttcagctaccgcctgatcgatcaccgcattgatagtgtgttctggcatcgcaaactgttccgggatcgggttcgctaccacgaggccaccgttcagcccgctttgccatttcaccgccattgcacgggcaatttcactggcgctgtcgagacgaatgctgacgtcaaacgggctggtacggcagaaaaacgcaggcagcgctttagtctgatagccaattaacggcacaccgaaggtttctaaatactcagtggttaatcctaaatcgagaatagatttcgccccggcacaaacaacggtgacattagtatttgccagttcttgcaaatcggcagaaatatcgaaggtatgttccgcccctcgatgaacaccaccaattccgccggtggcaaatactttaattccggcaagcgccgcaataatcatcgttgaagccacggtggttgcaccnnttnttccggcggcaacgacaaaaggtaaatcgcgacgactaactttagtcacgttatgcccttcacgacccagtaattcaatttcttctttgcttaaacccactttcatcacaccgccaataatggcgatagtggcaggtactgcgccctgtttacgaatagtttcttctacttcaattgcggtctgggcattttgtgggaacggcatcccgtgagaaataatggtcgattccagcgccacaaccggttttttnttttttnnagcgtcctgcacttccggggaaatttgtaataattcaggggaaatttttaattcagacattctgcgttctccactaacgatataacgttggcaatcgataaatcggggttattggtgtattcacaggagagcgccattgacgaacatccctgtgcgaaacgaacagattcggcaaacggcattccgtctacccaacacgaagcaagtcccgccatcatggcatcgcccgctccggtaacattaataacattggttttgatcggcgcagaccagccactttcaccgctgatatcgctgtaataaacgccgtcgccgcccatgctcaataccagtcggttcaggccatgttgatggaaccaggcagcaacttttgccacatcttcacgccctgacagcgcaatcccactcagggtttccgcttcaaggcggtttggcttgagagtatggatttgacttaatcgctcgcgtactttgacgcatttccacgcggaaaccggatcgacaaatacgggtacgttggcagcattatccagaatccatgccagtgcctcttcactgatattacagtccgcgacaatgacctttgccctctgaataaattcacggtgctgtgcgagatattcagctgtaatagcgttgctaatattcatgtcatttatagcaaccagcatttcaccggtattatcgagtaatgataaatagctcgacgtattttctcccggcacaatcaggcatttatcgacataaacgccagattgattggtttgcgttagcagcgattggccataaaaatcactgcctacggcgctcagtagccaggctttattacccagcaacgccaggttttgtgcaatattgcgccctaccccaccaggcgtaaattttattttacctggatttgaatccgcataatttaatgattcatgtgaatatccggcgacatcaatattcgccgagcctataattacgacataatccttttcgcgcatagcacgtcctctggtaaaaaattaccaaccctgtcaatccacaaggatatagatactgcaaagacggtttaaacatgtgttcatatttaaacatgtgctcatagtatgcatgttttacgtaaagtaaattgccgccagagaggcaaagcgggcagatttgagcaggctcacaaaatgcgattaaatgcctgaattacaaaagcgaggaatttgtgacgggatgcacagaacatgaacactaaaaaagggcagaaaagaatctgcccttgaggaaataaccttagtgtttgatgaacgtttcaggtttctactgaaagataaaaccatttaaattcataaaattacattcacaaaccggtcattctctttgcgctcatccaatgatacggggcagtaaatttctgccctgtaacacaccttttattacgcggctttcgctactgcgtccacttccggacgtttcaggaaggcataggccaaacccgccaccagcgtaccggcaataattgctaccaggtaacccagtaccggcgtaatagcgccagggatcagcagaacaaacagaccaccgtgcggtgccatcagtttcgcaccaatcgccattgagattgcgccagtcagcgccccaccaacgatacaacacggcagcacacgcatcggatcacgagcagcaaacggaattgcaccttccgaaataaagcacagaccaagaaccagagcggctttgccaccttcctgctgcgctttgtcaaatttgcgacgcgccaccattgttgccagacccattgccagcggtggcaccatacctgccgccataatcgccgccatcgggccataggtttgagtactcagcagacccacaccgaatgcgtacgctgctttatttaccggaccgcccatgtcagtacacatcatgccaccgaggatcgcccccagcagaaccgcattcgcagtccccatggtctgcagccagtgagtcaacccttcgagaatgccagcaaccggtttaccgatcaggtagatcatcgccagaccgaccaccagactggaaattagcggaatgatcaggatcggtttcagcgcctccatactctgtggcagtttcagttgcgtactgattaacttcgcaatgtaaccagccaggaagcccgcaataataccgccaatgaagccagaaccggtgctgaccgccagcataccgccaatcagacccggcgtgagacccggacgatcggcaatggagaaggcaatataacctgccagtaccggcaccatcagcgcaaaggctgaaccaccaccaatctgcatcagcgccgctgccaacgtacccggctctttaaacgcttcgataccaaaagcaaaagaaagcgcgatacacagaccacctgcaacgaccatcggcagcatgtaagagacgcccgtcagcaagtgacggtatgcgcctgcactctcgttcttaccttcagaggtcgccgtttgagctttgcccgccggttcatacggcgttgcttcagcaaccgctttatccagttcctgcgcggttttcttcagcgccagaccggtagaggtgcgatacatcggtttaccagcaaatttcgccagatccacttcgatatctgccgccacaatcaccagatccgctgcggctacttcttcgggagtgattgcattacccgcgccaacagaaccacgggtttcaactttcacccaccagccacgttttttcgcttcggtttcaatggcttcagccgccataaaggtgtgtgctacgccagtcgggcaagcagtcaccgcaactacgcgtttcggaccgctggcggcaaccggtgctgtcgcagcgaccggcgcagtgtaaggtttcgcatggcctttggcttcactcaggaacagctcagggtgcgcaactgcccgggaaatatcgcccagccagacatttttaccgttcagcgcgctgtcattcgggatggaatcaccgagaacaatcgccatttctgcgtcgttcggattgtcgatgatttccagttttgcttttcgcgccgccgcgcccagcagggtcttcgccatataggcgcgtgcctgaccgagattagcgtcaataatcagcagcgttttcattatgcctctcctgctgtcagttaaaaggttgtaagtcgacgcgcgccatcattgcggccaactgcggacgatcggtaatacccacattgctttgacttaccgccagggctgcaacagcagtcgccagacgcagtgtgtgttcactggattcacgcattagcaagccataaatcaggccaccaaccatagaatcccctgcgccaacggtgcttacgacatcgactgacggtggtttggcgatccattcgccggaggcattaacccaaagcgcgccttcggcacccagtgaaataacgacatgcgcaataccttgttcacgcagcgcatgcgcagcttcaatcacatctttcatttcaggcagtttacggcctgcccagatttccagctcgcggcggttaggtttcaccagccacggtgccgctttcaaacctgctactaacgcttcacggctactatcaaagataatgcaagggcactgactacgcaggcgagtcatccagtcggtgaacgcttccgggctgacgcctgacggtaagcttccgctgacacagaccatatcgaactgaccgagccagctcagagaatcagtcacaaagcgttcccagtcggcgggggtgacttcaaaacccgagaagttgaagtcggtcacttcgccgtctttttccgtcagcttaacgttaattcgggtgcgcccctgtacaacctggaaacggttggcaatgcccagctcgctgaacagttgctgaaaaccatcctgattgtctttaccgaggaagccgccaacggtgacatcaattcccaggtcttttaatactttggccacgttgatgcctttacccgccgcatgcagaccggtggttttcaccaggttcacttcgccgcgttcaatttccgggcagaaaccaacaaggtcataagccggattaagggtgatagtagcaacacgtctgctcattatgcgccctccccaagaccagcagcgatagcgtcgccgattgctttcagcgcctgttcagcatctgcaccctgggcggtaaagcgtaggcgatgacctttcttaacgccaagtgccacaactttcatcagactacgtccgtttgccggtttgccggtgccatcaaggtttgtcacggtaatatcactgttaaattgtttaatggtgttgaccagcatggtacctggacgagcatgcaggccgtgttcattgcgcaccacaaactccgcgcttaacacgtcgtcggtcggcgcatcatcgctggtcagcagcgccagcaacgttgccgcatccgctttcagcaagcggtcagctttattgtcgagcaacaaatcagcgagacgcttaagaaccgcaatgggctgatcgtcattcatcgccacactcaccagcatggctgccgtttcgccgtccacatcaaaagcatttgccgcacggnttaccgcaattgcgctacgcagattgccttcggcgctatcgctcagccagataccctgtccgaggttcagcggttgttcattgatggctttggtgacgaaagtggcgtcaactgcccccgcctctttcagacgcgcagcgttcagcgcctgaagagtcagcagatcgctggcgacgatatccagcgtcagcatttcgttgtcgagcttcagctgctcactctgcttttcgcccatcagcaatgcgcgaagttcttctgctgttgttgctgacttcagttgttcagcaacggaatcatcgctcagtacgtgggtcagctggcgtagcaggcccagatgctcatccgagctggcagcaataccgatcgctacgtacgctacctgaccgtcaccccaggtgacgccttccgggaactgaaatacctgaacgccggttttcagcacctgatcgcgggtgtcggtagtgccgtgtggaatagcaataccattgccgaggaacgttgaggtttgctgttcgcgcgccagcatgccattgacgtagccttctgctacattaccggcctgcaccagcgccgcagcgacctggcgaatcgcctcttctttgtctccggccttttcgcccggatggatgtcctgtacggataactggaacatagttctcctctcttgctgaattgaaacgattcagcttctatgagaaaaaaagcgccaacctggcttagggttaaagacaagatcgcgctgaaacgtttcaagaaagcataatacttctgtttcagcacgcaaggaaagccgtaaagttatgagcaaaagtttgatgtgctgcacaattttttgtcatttttcctaattgctgatgggaaaatccgttatcagcaatttcatttcagcagcgtcagcagccaatcagcaacagtgaaatggcattttgattattcgtggcgcttttgatttcgctgtctgtttattttctgacaagcagcgtaaactccgcgtcttcctcttccagtgatcgaccagcatgcataactcccccgcagtctccagcgcgaaatcgtttgacctgacctcgacggcgtttttaatcgttgcctttctcaccggtattgcgggcgctctgcaaaccccgacactcagtatttttcttaccgatgaagtacatgcccgtccggcgatggtgggattcttctttaccggcagcgctgtcattggggttctggtgagtcagtttctcgccgggcgctctgataagcgcggcgatcgcaaatcgctgattgtcttttgctgcctgttaggcgtgctggcctgcaccctttttgcctggaatcgcaactactttgttttgctattcgttggcgtctttcttagcagctttggctcgaccgctaacccgcaaatgtttgcccttgcccgtgaacatgccgacaaaaccggacgtgaggcggtgatgttcagctcttttttacgcgctcaggtttcactggcatgggtcattggcccaccgctggcttatgccttagcgatgggtttcagctttacggtaatgtatctgagcgcagcggtagcatttattgtttgcggcgtgatggtgtggctgtttttaccgtcgatgcaaaaagagcttccgctggcgaccggcacggttgaagcgccgcgccgtaaccgtcgcgatacgctgctgctgtttgtcatttgtacattgatgtggggctcgaacagcctgtacatcatcaacatgccgctatttattatcaacgaactccatcttcccgagaaactggccggtgtgatgatggggaccgccgccgggctggaaatcccgaccatgttgattgccggatatttcgccaaacgtctgggtaagcgtttcttaatgcgcgttgctgccgtgggtggcgtctgtttttacgcaggaatgctgatggcgcattctcctgtcattctgttgggcttgcagctgctaaatgctatttttattggcattctgggcggtatcgggatgctctattttcaggatctgatgcccggtcaggcaggttcagccaccacgctctataccaacacgtcgcgcgtgggctggatcatcgcgggatcagtggcgggcatcgtcgccgagatctggaattatcacgctgtgttctggtttgcgatggtgatgattatcgccactctgttttgcttactgcggattaaagatgtttaaggcgcggtcagcatttccagatcgataagccaggtcattgcctgctgacgcgagttaccgcacatttcagcgctggcttgtaagcctgcacagactttcggccgcagtggcgaggtgaaaattttacagcgttgctgttcatcaagctgaatgcagggcgtattggcgggcttgccatctggcataccgggaatagggctggaaattgaaggggcagtgcaacacgccccgcaacccggacggcattccatacgttgttctcttaaggttaaccaccggattgatgagcgcgcacagtaccaccttttttgcaccagcaaaagtgcgaataccacttgcccgaaaggctcgtcgcgagtactttgtcgcgatatttttgacattttcgactacaggaatttttcgatgccaagagcgaacgaaattaaaaaaggtatggtactgaattacaacggcaaactgctgctggttaaggacattgatattcagtcgcccactgcccgcggtgccgctacgctgtacaaaatgcgtttttctgatgtccgtaccgggctgaaagtagaagagcgtttcaaaggagatgatatcgttgacaccgtgacgctgacccgccgttacgttgacttctcctatgtcgatggcaacgaatatgtctttatggataaagaagactataccccgtataccttcaccaaagatcagattgaagaagagttgctgtttatgccagagggcggcatgccggacatgcaggtgctgacctgggacggtcaactgctggcgcttgagctgccgcagaccgttgatctggaaatcgttgaaaccgcaccaggcatcaaaggggcatctgccagcgcccgtaacaaaccggcgacattgagcactggtctggtgattcaggtaccagaatacttaagcccgggcgaaaaaattcgtatccatatcgaagaacgccgttatatggggcgtgctgactaacttcagccgcatgcagaaaagggatagctcaggctgtcccttttttaatttattataccaatcttctattttgcgcttcctgaacaccttacgccctcaattttcactcgttgattgatcgccctcacacttcatcgcattaacaatccagaccaatttcaattgctgtcatataactttacactgtcattgttaattaatcgttactaagacatgactcctatgaatacaatcgcctccgttacgctcccgcatcatgtacacgctccacgctacgatcgccagcagttgcaatcacgtatcgttcattttggctttggagcctttcaccgcgcacatcaggcgttactgaccgatcgtgtgctgaatgcccagggcggcgactgggggatctgtgaaatcagcttgttcagcggtgatcaactgatgagccagctccgcgcacagaaccatttatataccgtgctggagaaaggggcggacggcaatcaggcgataattgtcggtgccgttcacgaatgcctgaatgcaaaactggattccttagcggcaattattgagaaattttgcgagccacaggtggcaattgtttccctgacgattaccgaaaaaggctattgtattgacccggccaccggtgcactcgacaccagcaatccgcggattattcacgatctacaaacccctgaagaacctcactccgcaccgggtattctcgtcgaagcactgaaacgccgccgtgagcgcggccttacaccgtttaccgtgctctcctgcgacaatattcccgacaatggccatgtggtgaaaaacgcggtgctgggaatggcagaaaaacgttcgccagaactcgccgggtggataaaagaacacgtcagttttccgggaaccatggtcgaccgcattgttccggctgcaaccgacgaatcactggcagaaatcagccagcatctgggggtaaatgatccctgcgcgattagctgcgaaccgtttatccagtgggtggtggaagataacttcgtcgctgggcgtcctgcctgggaagtcgcaggtgtacaaatggtgaatgatgtcctgccatgggaagagatgaaactgcggatgcttaatggcagccactcttttctcgcttatctgggttacctctcaggattcgcccatatcagtgattgcatgcaggatcgcgcatttcgccatgccgccagaacattaatgctggatgagcaagcgccgacactgcggattaaagatgtcgatttaacacaatatgcggataagttaattgcacgttttgctaatccggcgctgaaacataagacctggcaaatcgcgatggatggcagccagaaattaccgcaacgcatgctggcaggtattcgcatacatctggggcgcgaaacggactggtcgttgctggcattaggcgttgcaggctggatgcgttacgtcagcggcgttgatgatgccggaaatgccattgatgttcgcgatccgcttagcgataaaattcgcgatcttgttgcgggcagcatcagtgagcaacgcgtcaccgccctgctttccctgcgtgaagttttcggtgatgatctgccagataacccgcattttgtgcaggccatcgaacaagcctggcaacaaatcgcacaattcggcgcgcatcaggcgctattaaacaccctcaaaatttaacgatttctgcggttaaagcggatgaagctcgccttcgtccgctctccccttctcttttctgccgtttttagccaggattaacgctcagttaacttaccagagtattgcggagctgttgtgaccaggaccaacctcatcaccggttttctcggcagcgggaaaaccacgtcgattcttcatctgttagcccataaagatcccaacgaaaaatgggcggtactggttaatgaatttggggaagtcggaattgatggtgctttgctcgccgatagcggcgcactgctgaaagagatccccggcggctgcatgtgctgcgttaatggtttacccatgcaggtagggttgaataccttactgcgtcagggaaaaccagaccgcttgttgatagagccgactgggctgggccatccgaaacagatcctcgatctgttaaccgcaccagtctatgaaccgtggatagatctgcgcgccacgttgtgcattctcgatccacgcctgctgctggacgaaaaaagcgccagcaatgaaaacttccgtgaccagctggctgccgcagacatcattgtcgccaataaatccgaccgtgcgacacctgaaagcgagcaagcgctacagcgctggtggcagcaaaatggtggcgatcggcaattaattcacagtgagcatgggaaagttgccggtcatcttctggatttgccgcgtcacaatttagccgagttgcccgccagcgccgcgcattctcatcagcatgtcgtgaaaaaagggttagcagcgttaagcctgccagagcatcaacgctggcgtcgcagtctgaacagtggacaaggacatcaggcctgcggctggatattcgacgctgatacggtattcgacaccattggcattctggaatgggcgcgacttgcaccggtggaacgcgtcaaaggcgtgctgcgtattcccgaagggctggtgcgaatcaaccgtcagggcgatgacctgcacattgaaacgcaaaacgttgcgccaccggacagccgtattgagctgatttccagcagcgaagctgactggaatgccttgcagagcgcgctgttgaagcttcgtttagcgactaccgcgtaaggttgcctgcgtttttcagtaagataattagagaaaatatgattaaaaatttgccgcaaatagtgttgttgaatattgtcggcctcgcgctgtttctttcctggtatattcccgttaatcatggattctggttgccgattgatgcggatattttttatttctttaatcagaaactggtcgaaagtaaggcctttttgtggctggttgcattgaccaacaatcgcgctttcgacggttgttcactgctggcaatgggaatgttgatgctgagtttctggctgaaagaaaacgccccaggcagacgacgtatcgtgattattggtctggtcatgctattaactgcagtggtattaaaccagctgggtcaggcattaattcctgtaaaacgggccagcccaacattgacttttaccgatattaaccgcgtcagcgaactgctctctgtccccacgaaagatgcctcacgagatagctttcccggcgatcacggcatgatgctgcttattttttcggcattcatgtggcgttatttcggcaaagttgcaggtcttatcgcccttattatttttgtggtttttgcgtttcccagagtaatgattggcgcacactggtttactgacatcattgtcggttcgatgaccgtgatattgatcggtttgccctgggtgttgctgacgccattaagtgatcgattaatcaccttttttgacaaatcactaccgggaaaaaacaaacattttcaaaacaaataactcacagtacttaacatcatcaggtttatttttatagtgaggataatcctgatgatgcgcaccgtgctttcatccatcgaaagcaaaaatcattctctaagtaaatgaatggattgcatgcatttcactcaatngtactttaattgaccaatcccgcttattaactttctgtatcactttttcttataaaaaatcatgtaaaaccgctcgccaagaccgcaccaatcgggtaatctcgaactcgttttgcctcggcggtagattatcctcacagcatataattttgtgcgttagtccacagatttggccttaaggaattgtttcaacatgcccaggtaattagtctcgtgtcgcttggcattttttttataacgatatttgtcgttaaggacttcaagggaaaacaaacaacatggtcaaatctcaaccgattttgagatatatcttgcnnnngatccccgcgattgcagtagcggttctgctttctgcatgtagtgcaaataacaccgcaaagaatatgcatcctgagacacgtgcagtgggtagtgaaacatcatcactgcaagcttctcaggatgaatttgaaaacctggttcgtaatgtcgacgtaaaatcgcgaattatggatcagtatgctgactggaaaggcgtacgttatcgtctgggcggcagcactaaaaaaggtatcgattgttctggtttcgtacagcgtacattccgtgagcaatttggcttagaacttccgcgttcgacttacgaacagcaggaaatgggtaaatctgtttcccgcagtaatttgcgtacgggtgatttagttctgttccgtgccggttcaacgggacgccatgtcggtatttatatcggcaacaatcagtttgtccatgcttccaccagcagtggtgttattatttccagcatgaatgaaccgtactggaagaagcgttacaacgaagcacgccgggttctcagccgcagctaataaaccgtttggatgcaatcccttggctatcctgacgagttaactgaaagcactgcttaggcagtgcttttttgttttcattcatcagagaaaatgatgtttccgcgtcttgatccaggctatagtccggtcattgttatcttttaaatgttgnnnnnnatttcaggaaattaacggaatcatgttcatacgcgctcccaattctggacgtaagctcctgcttacctgcattgttgcaggcgtaatgattgcgatactggtgagctgccttcagtttttagtggcctggcataagcacgaagtcaaatacgacacactgattaccgacgtacaaaagtatctcgatacctattttgccgacctgaaatccactactgaccggctccagccgctgaccttagatacatgcaagcaagctaaccccgaactgaccgcccgcgcggcgtttagcatgaatgtccgaacgtttgtgctggtgaaagataaaaaaacattctgttcatctgcgaccggtgagatggacattccactcaatgaattgattcctgcgctcgacattaataaaaatgtcgatatggcgatcttacccggcacgccgatggtgccgaacaaacccgcaatcgtcatctggtatcgcaaccctttgctgaaaaatagcggcgtctttgccgctctgaatctcaacctgacgccttctctcttttatagctcacggcaggaagattacgatggcgtcgccctcattattggcaatactgcgctatctaccttttcttcacgtttgatgaacgttaacgaattaaccgacatgccagtccgtgaaactaaaattgcgggcattcctctgaccgttcggctttatgcagatgactggacatggaacgatgtgtggtacgcatttttactgggcggcatgagtggaactgtcgttggcctgctctgctattacctgatgagcgtacgtatgcgccccggcagagaaatcatgaccgccatcaagcgcgaacaattttacgtggcgtatcaaccggtggtggatacacaagctttgcgagtaacgggcctggaagtactgctacgctggcggcatcctgtcgcgggagaaattcccccggatgccttcattaactttgccgaatcgcaaaagatgattgtgccgctgactcagcacctgtttgagttaattgcccgcgatgccgcagaattagaaaaagtgctgccggtaggcgtcaaatttggcattaacattgcgccngaccatctgcacagcgaaagctttaaagcaaatatccagaaactgctcacttccctacccgcacaccatttccagattgtgctggaaattaccgagcgcgatatgctgaaagagcaagaagccacacaactcttcgcctggctgcactcggtcggcgtagaaattgctattgatgacttcggcaccgggcacagcgcgcttatctatcttgagcgttttacgctcgattatctgaaaattgaccgtggatttatcaacgccatcggtacggaaacgatcacttcacccgtacttgacgcggtgctgacgctggcgaaacgcctcaatatgctgacggttgctgagggggtcgaaacgccggaacaggcgcgatggctaagcgaacgcggcgttaatttcatgcaaggctactggattagtcgcccgttaccgctggacgattttgtccgctggctgaagaaaccgtatacgccgcagtggtaaggtgtgcttacgtcccttattattcatagtgaaagcatgccggattgcggctaatgatgagtaaaaggaaatccgttgcagatgattgtgcgcatactgctgctgtttatcgctctgttcacctttggtgcacaggcgcaggctatcaaggaaagctatgcctttgccgtgctgggcgaaccccggtacgcgtttaatttcaaccattttgattatgtgaaccccgccgcgccaaaaggtgggcagataacgttgtcagccctcggtaccttcgataatttcaaccgctatgcactgcgcggcaacccgggcgcacgcaccgagcagctgtacgacacgctatttacgacttccgatgacgaaccaggcagttattacccgctgattgctgaaagcgcacgctatgctgacgattattcctgggtggaggtcgctattaatccgcgcgcccgttttcatgatggttcgcccattactgcccgcgatgtagagtttacttttcaaaaatttatgactgaaggcgtgccgcaatttcgtctggtctacaaaggcaccaccgtcaaagccattgcgccgttaaccgtgcgcattgagttagctaaacccggcaaagaagatatgttgagtctgttttcgctgccggtatttccagaaaagtactggaaggatcacaaacttagcgatccgctcgccacgcctccgcttgccagtggtccgtaccgaattacgtcctggaaaatggggcaaaatattgtctattcccgcgtgaaagattactgggcagcaaacttaccggtaaaccgtggacgctggaatttcgacaccattcgctacgattattacctcgatgataatgtcgcctttgaagcgtttaaagcaggtgcctttgatttgcgtatggaaaacgacgccaaaaactgggccacacgctatagcggtaaaaatttcgataaaaaatacatcatcaaagatgagcaaaagaacgaatcagcccaggatacgcgctggctggcgtttaatatccaacgtccggtattcagcgatcgccgggtccgggaagcaatcaccctcgcctttgactttgaatggatgaacaaggcgttgttttacaatgcctggagtcgcacgaacagttattttcagaataccgaatacgcggccagaaattaccccgacgccgcggagctggtgcttctggcaccaatgaaaaaagatttaccgccagaagtcttcacacaaatctaccagccgccggtatcgaaaggcgatggctacgatcgtgacaacctgttaaaagccgacaaacttctcaacgaagcgggctgggtgctgaaaggtcagcaacgcgttaatgccactacgggtcagccgctcagctttgaattattgcttcctgcaagcagcaatagtcagtgggtattgccgttccagcacagcctgcaacggctgggtatcaacatggacattcgcaaggtggataactcgcaaatcaccaaccgcatgcgcagtcgcgactatgacatgatgccgcgcctatggcgggcgatgccgtggcccagttccgatttacagatttcctggtcatcggaatatatcaattccacttataatgcccccggcgtgcaaagcccggttatcgactcgctgatcaaccanattattgccgcgcagggaaataaagaaaaattactgccgttagggcgagcactggatcgcgtattaacgtggaattattacatgctgccaatgtggtacatggcggaagaccgtctcgcctggtgggataaattctcccaacccgctgtgcgccctgtttacagtctgggtatcgatacctggtggtatgatgttaataaagcggccaaactgccgtcagccagacaacagggagagtagatgggcgcttatctgattcgccgtctgttgctggtgatcccaacgttatgggcgattatcactatcaactttttcatcgtgcaaattgcgcctggcggtccggtcgaccaggccatcgccgccattgagtttggtaatgccggagtattacccggcgcaggcggtgaaggcgttcgcgccagccatgcgcaaacgggcgtcggtaatatcagcgacagtaattaccgtggcggacgcggattagatccagaagtgatcgccgagatcactcatcgctacggtttcgataagccgatccacgaacgttacttcaaaatgctctgggactacatccgctttgattttggcgatagcctgtttcgcagcgcctcggtgctgacgctgattaaagacagactgccggtttccatcaccctcggattgtggagcacgctgattatctatctggtgtcgattccgttaggcattcgcaaagctgtttataatgggagccgctttgacgtctggagtagcgcatttatcatcatcggctacgccattccggcctttttgtttgccatcctgctgattgtcttcttcgcaggcggcagctatttcgacctgttccctctacncgacctggtttccgctaactttgattcgctgccgtggtatcagaaaatcaccgattatctgtggcatatcacgctgccggtgctggcgacggtgattggtggctttgcggcgctgactatgctgacaaaaaactcattccttgatgaagtacgcaagcaatacgtggtgaccgcacgtgcgaaaggggtaagtgaaaaaaatattctctggaaacatgtgttccgcaacgccatgctgctggtgattgccggttttccggcgacgtttatcagcatgttttttaccggctcgctgctgattgaggtgatgttttcactcaatggtcttggcttactgggctacgaagcgaccgtctcgcgcgattatcctgtaatgtttggtaccttgtatattttcaccctgattggcctgctgctgaatattgtcagtgatatcagctatacgctggtcgatccgcgtatagattttgagggacgttaatgtcgcgantcaaccccgtcaatcaggcccgttgggcgcgttttcgccataaccgtcgcggctactggtcgttatggattttcctcgttttgtttggtttgagtttgtgttctgaacttatcgccaacgataaaccgttgctggtgcgttatgacggcagttggtatttcccgttgttgaaaaactacagcgaaagcgattttggcggcccgctggcaagtcaggctgattatcaggacccgtggctgaaacaacggctggaaaataatggctgggtactgtgggcaccgattcgctttggtgctaccagtatcaactttgctaccgataagcccttcccttctcccccctcccggcaaaactggctgggaacggatgccaacggcggcgatgtgctggcacgtattctctatggcacgcggatctcggttctgtttggcctgatgctgactctctgttccagcgtgatgggcgtgctggcgggggcgctacaaggctattacggcggtaaggtcgatctctgggggcagcgctttattgaagtatggtcggggatgccaacgctgtttttgattattctgctttccagcgttgtgcaacctaacttctggtggctgctggcaattactgtcttatttggctggatgagtctggtcggcgtggtgcgggcggagtttttacgtacccgcaatttcgactacatccgcgcggcacaggcgcttggcgtcagcgatcgcagtattattctgcgtcatatgttgccgaatgcaatggtcgctaccctcacctttttaccgtttattttatgtagttcgatcaccaccctgacctcactcgatttcctcggcttcggtctgccgctcggttcaccgtcactcggtgaactgctgttacaagggaaaaataaccttcaggctccgtggcttgggatcaccgccttcttgtcggtggcgatattattgtctttgctgatctttattggtgaagccgtccgcgacgcatttgatcctaataaggcggtgtagcatgacgcaaactctgttagcgattgaagatttgtcggtgggttttcgccatcagcaaaccgtacgtacagtagtcaatgatgtttcactacagattgaggctggcgaaacgctggcgctggtgggtgagtcaggttcaggcaaaagcgttaccgcgctgtcaattttacgcctgctcccttccccgccggttgaatatctctccggcgatattcgttttcatggcgaatcgctgcttcatgccagcgaccaaacgttgcgcggtgtacgcggtaataagatcgccatgatttttcaagagccgatggtgtcgttaaatccattgcataccctggaaaaacagctttatgaagtgctttcactccaccgcgggatgcgtcgggaagcggctcgtggcgaaattcttaactgccttgatcgcgttggtatccgccaggcggcaaaacggctgacagattatccgcatcagctctccggcggcgaacgccagcgggtgatgattgcgatggcgctgttaacgcgaccggaattattaattgccgatgaaccgaccaccgcactggacgtctctgtccaggcgcagattttacagctgttgcgcgaactgcaaggcgagttgaatatgggcatgctgtttattactcataacctcagcattgtcagaaaactggcccaccgcgtggcggtaatgcaaaacggtcgctgtgtcgagcaaaattacgccgctacgctatttgcctcacccactcatccttacacacaaaagctactcaacagtgaaccgtcaggcgatccagtgccgttgccagaacctgcctcaacgttgctggatgttgaacagcttcaggttgccttccccattcgcaaagggattttgaagcgcattgtggatcataatgtggtggtgaaaaacatcagttttacgctacgagcgggtgaaacactgggtttagtgggcgagtccggttccgggaaaagcacgacgggactggcgctgctgcgactgattaattctcagggcagcatcatctttgacggtcagccactgcaaaatttanatcgccgccagctgttacctattcgtcatcgcattcaggtggtatttcaggatccaaactcctcgctcaacccacgactcaacgttttgcanattattgaggaaggcttacgggttcaccagccgacgctttctgccgcacaacgcgaacaacaagtgatagacgtgatgcatgaagtgggattagatcctgaaacacgccaccgttatccggcggagttctctggtggtcagcgacaacgtattgcgattgccagggcattaattcttaagccctcgctgatcatacttgatgaaccgacatcatcactcgacaaaacggtacaggcgcaaatattgacgctattgaaatcattgcaacaaaagcatcaactggcctatttgtttatcagccacgatttgcacgttgtccgcgcgttatgtcatcaggttatcgtactgcgacaaggggaagtagtggaacaaggaccgtgcgcgcgcgtgtttgccacaccgcagcaggagtatacgcgtcagctactggcgttgagctgacgcttaaaaaggattgtagtttgaaaagggttcggcaattgccacaccaaaatttttcaatcggcatgttgcagcaaactcgtcctggcgatttacaaacaggcacggctcaccttcacactccagcaccgaacatggaacttcgatgtcgcttaacgcctggcttagtttatacatcaccgaccatgcattatcaccatccgggctaagcaatttaagcgccaccaggctgttgtcaccgcacggtccattttgcggaatcggttcaaccttcgaacctgcgaaaccagcagaccagcgatagttctgcggcagtcgatggacgattgagagttgtaatgaagtcacttattttccccggaagcacatttacttcacaatttgtttacatcaattttaacacatcatcaacaatccgtctttatacagatcgtaaagattgatgcctcgcctgcgtggcctctatggctctgatttaagtaatatctgcgggcgtggtcacgtttgcggggctatatgtacccgtttctgcgatctaactcaacctttttaactacaatgatgtgactttttacataaattgattttacataaaataaacatatatcgggggaatgatagatttgtggttgacatgcatcaacaaaggaagccttttagcttcctcgttgtgcaatagatcaccgttttttcggccgactggcgtacagacagaagagaatggagctggttgcgcagaatgcaattgaccaaatcatcggccatgcagagttaaaggtcgcaagagaaagcaatgcgccaacaattgcccctatgccaaaacggaaggttcctgccagcgaagatgccgttcccgccatatggggaaactcatcaagaatgaccgccatcgcattggatgacaccatcgacacgcagcccacaaacgccgcaacgccaaccaccagcgaccaaaatcccagacccagcagcgcactgatgaccatccacgctgccataanaaattgtatccacaaccccgagcggaacatatttaacgcgccaatacggcggacgaagcggctattaaagatggtcatcacgaacaggaaaacaatgtttagtgcaaagtaataaccaaagttttccggcgcgacgtggttaatttcaatgtagacaaacggtccggcgcttaagaacgagaacatcccggcaaagctgaaaccactggccagcatataactcaggacacgcttatgacggaacagcgccgcaaagttaccaatagtggtacgaatgtgaaaaggctggcgacgctccggtggtaaggtttctttgatcagaaagaagatcattgccgaagccagaatcgccgccacggcgaggatccagaagatgtaatgccagctcagccacaccagcacccagccgccaactatcggtgccatcagcggtgcaatggtcgtcaccagcatgacaaacgacatcatccgcgagaactcttctttcgggtagatatcacgcatcaaagcgttgataaccacgctggccgcagccgccgccagcccgtggaagaaacgcatcacaatcagctgatcgatggtttgtgccaacgcacacgccaccgcggcggcggcaaacaccagcgtaccgccaagaaccaccggcttacgcccgaagctgtctgccatcggcccgtagattaactgccccaacgcaaagcccagaatataagtactgagggtcatctgcgtactgcccgccggtacgccaaactgcgctgaaattaccggtagcgcgggcagatacatatcaatcgacagcggcatcaacatggccagcaggccaaggataaaaacaatagcaaacgacgaatgctgtcgggtggtcacaacgggctcctgaaagtcattgaaaagttagacgacgctggcaatttcttcttcagttaacggacgatattcaccgggggctaaatcagcatccagcgtaatgccgccaatacgttcacgatgcagctcaaccacatggttacccacggcggcgaacatgcgtttcacctgatgataacgcccttcgctgatggtcagacgaacctgcgttggggtaatcacttcaagcaccgctggcttagtgagatctttttcgttatgcagctgcacgcctttagcaaattgctctgccgtatcgtcagctacgggtgattccagcgtcaccagataggtcttctcgcaatgatggcgcggagaagtaatgcggtgcgaccactgaccatcatctgtcattagtaccagaccggtggtatcgatatccagccgccctgcggcgtgcagtttccacgccactggttcatctagaaaatagagcaccgttgggtgatcagggtcgtccgtggagcaaacatagccctgaggcttattgagcatgaagtaacgtggaccgtgttgctgcgccagcgggttgccatcgtaagcgacatcatgttcaggaagcagtttgaacgctgcattacggacgatttcgccatcgacggtgacacgattgccgcggatttcacgcccggcaatagcacggctaacgccgagttgctgtgcgataaatntatcaagtcgcatgtgtgtgattttgcctgtaaaaacggaggtcgggcattgacccgaaaatctgaactgttgtctgcccagtatagcggtctaataacttccctcaagggaaaaagaaccgtggcatactattagcagaataatctacctacgcgagaccatgatttttacactccgcccatatcagcaagaagccgtggatgccacgctcaaccattttcgtcgtcataaaacccctgccgttatcgtgctgcccaccggtgcaggtaaaagcctggtgatagcggaacttgcgcggctggctcgtggtcgcgtgctggtgctggcacacgttaaagaactggtggcgcaaaaccatgcaaagtatcaggcgctggggctggaagccgatatttttgccgccgggctaaagcgcaaagagagccacggtaaagtggtatttggcagcgtgcagtcggtcgcccgtaatcttgatgcctttcagggtgaattttcgctgttgattgtcgatgaatgtcaccgtattggtgacgatgaagagagccagtatcagcaaatcctcactcacctgacaaaagtgaatccccacttacgcctgctggggctgactgccacgccttttcgactgggcaaaggctggatctaccagttccattatcacggcatggtacgcggcgatgagaaagcccttttccgtgactgcatttatgaactgccgctgcgttatatgatgaaacacggctatctgacgccgccagaacgactggatatgccagtagtgcaatacgatttcagccgcttgcaggcacagagtaacgggctattcagcgaagccgatctcaaccgcgagctaaaaaaacaacaacgtattaccccgcacatcatcagccagattatggagtttgctgcaacgcgcaaaggggtgatgattttcgccgccaccgttgaacacgcaaaagagattgtgggattactacccgccgaagatgctgcactgattactggcgacacccccggcgctgagcgcgatgtgttaattgaagattttaaagcccagcgttttcgctatctggtcaacgtcgcggtactgaccaccggatttgacgccccgcacgtcgatcttatcgccattctgcgccctaccgaatcagtgagtctttaccaacaaattgtcgggcgcggtctgcgtctcgctcctggcaagactgattgcttaattcttgattatgcgggtaatcctcacgatctctacgcgccggaagttggtacaccgaaaggcaaaagtgacaacgttccggtacaggttttctgccctgcctgcggttttgccaacaccttttgggggaaaacgaccgccgacgggacattgattgaacactttggtcgccgctgtcagggatggtttgaagatgacgacggtcatcgcgaacagtgtgacttccgtttccgttttaaaaattgcccgcaatgtaacgcagaaaatgatattgccgctcgccgctgccgcgaatgtgacacggtactggttgatccggatgatatgttaaaagcggcgctacgactgaaagatgcgctggtattacgctgtagcggcatgtctttgcagcatgggcacgacgagaaaggcgaatggttgaaaatcacctattacgatgaagacggcgcggatgtgagtgagcgtttccgtctgcaaacgcccgcccagcgaactgccttcgagcagctttttatccgcccgcatacgcgcacaccgggcatccctctgcgctggatcaccgccgccgatatcctcgcccagcaagccttattgcgacacccggattttgtcgttgcccgcatgaaaggtcagtactggcaagtgcgtgaaaaagtgttcgattacgaaggtcgttttcgtcggnngcacgaattacgcggttaatgatagttttgattgatgtataaggcgattgagtatagaatctcgcccgcttttgcatacgcaaagcagatcacttacctgttgctgggtcgcctgtagcaggattaatttaagagagaaagaaatgtttactatcaacgcagaagtacgtaaagagcagggtaagggtgcgagccgccgcctgcgtgccgctaacaagttcccggcaatcatctacggtggcaaagaagcaccgctggctatcgagctggatcacgacaaagtcatgaacatgcaagctaaagctgaattctacagcgaagttctgaccatcgttgttgacggtaaagaaatcaaagttaaagctcaggacgtacagcgtcacccgtacaaaccgaagctgcagcacatcgacttcgttcgcgcttaattgctgaataagttgtaaaaaaccccgctccggcggggttttttgtatctgcagattatgcctgattacgatattgctattttttgcaggccagataaggcgttcacgccgcatctggcattcataacacaaaaccgattaattgccgccggacgtccggcgctgcnattgatcgcgcaaattcggcggcgtgcctttaatagtcagggtatcggtcgccggatcccagaaaatccgttcgcccaacagcatcgcatcaaaattaatagtcaagccaccgccgctaccggcaaacttcgtcaactgacgcagtgtgctacggtctgccgggaagctctcttccagttcgtagcctttttcagccgcaaactccgtgaagctcacttcgctgacgcctgccagctctttcgacagcgattccagttcgatctcttcgcctgcctgcagctgctcattacagtagctataaacctgctggcgcacgttctgtcgctctgctttatccagttgtgcttcggcagtgaaatcatcaaccgcttgcaacagcccacggttttgcgctttcgcgttcaatccttcgctggccccgaggaaatccataaagaaatccgccactttgcgccctactcgccctttcaggaaagtgagatagcgggtcgactctggattggtttcccattcggttaaatcgatacgcgcaacaatatccgcatgattgatatcaagataatgggttgggttgatgtcgagattttcgttaacgcgcatactgctcaggttgctcaggactgccaccagcagatactccaccgccagataacggtagtggcaaaacagcacgaatccaccgtcagcaaaaggatatttcgctaattcgtcacgcaggcgaccggnnnncgcgcggctaaatgccagaaagtcctcttcaccctgacgctgtaagcgcagcgtctgcgccagttcactctcttcgctaaacaagccgtaagctttatttttggcgctatagacccgatgcagttctgctaccatctcaacgacggtttctgtcggttccagcaatgaatcgcgcaacaccagctcaaggttctgctcatcacgcttgataagctggtgcagagcaatctggttgatatccagactcatgataaactctcctttaagaccgggcggtattcaaccaccgccggttaagcgacgcaataaaagatggcggtcattttacagaaggcggcgtaacgagaatgatttaacgcataaaaaagcagaaaaaaaaccgttgctacggtaatatgttgccctttcatcaactaactgatttcgatttatgccacaaatttcccgctacagtgatgaacaggttgaacaattgctcgcagagctgctcaacgtactggaaaaacataaggctccgaccgacctttccctgatggtgttaggcaacatggtcactaaccttatcaacaccagcattgccccggcccaacgccaggcaattgccaactcttttgcccgcgccttacagtcctctatcaacgaagacaaagcgcactaagggaaacagataacaggttatggtaactcatcgtcagcgctaccgtgaaaaagtctcccagatggtcagttgggggcactggtttgcactgttcaatattctgctttcgctcgtcattggcagccgttacctgtttatcgccgactggccgaccacgcttgctggtcgcatttattcctacgtaagcattatcggccatttcagcttcctggtgttcgccacctacttgctgattctcttcccgctgacctttatcgtcggctcccagaggctgatgaggtttttgtccgtcattctggcaacggcgggaatgacgctattactgatcgatagcgaagtctttactcgtttccatctccatcttaatcccatcgtctggcaactggttattaacccagacgaaaatgagatggcgcgcgactggcagctgatgttcatcagcgtgccggttattttattgcttgaactggtgtttgcgacgtggagctggcaaaagctgcgcagcctgacgcgtcgtcggcgcttcgcgcgtccgctggccgcattcttatttatcgcctttatcgcctcgcatgtggtgtatatctgggccgatgccaacttctatcgccctatcaccatgcagcgcgctaacctgccgctttcgtacccgatgacggcgcgacgttttcttgagaagcatggcctgcttgatgcgcaggagtatcaacgccgtcttattgagcaaggtaatccagacgccgtttccgttcagtatccgttaagcgaactgcgctatcgcgatatgggcaccgggcagaatgtcttgttgattactgtcgatggcctgaactactcacgcttcgagaagcagatgcctgcgctggcaggttttgctgagcaaaatatttcgttcacgcgccatatgagctccggcaacactacagacaacggcatctttggcctgttctatggcatctcgccgagctatatggacggcattctgtcgacccgtacacctgcggcattaattactgcgcttaatcagcaaggctatcagctggggttattctcatcagatggctttaccagcccgctgtatcgccaggcattgttgtcagatttctcgatgccgagcgtacgcacccaatccgacgagcagaccgccacgcagtggatcaactggctgggacgctacgcacaagaagataaccgctggttctcgtgggtctctttcaatggtactaacattgacgacagcaatcagcaggcatttgcacggaaatatagccgggcggcaggcaatgtcgatgaccagatcaaccgcgtgctcaatgcactgcgtgattctggcaaactggacaatacggtggtgattatcactgccggtcggggtattccactgagcgaagaggaagaaacctttgactggtcccacggtcatctgcaggtgccattagtgattcactggccaggcacgccggcgcagcgtattaatgcgctgactgatcataccgatctgatgacgacgctgatgcaacgcctgntacatgtcagcacacctgccagcgaatattcgcaaggtcaggatttgttcaaccctcaacgccgtcattactgggttaccgcagcggataacgatacgctggcaattaccaccccgaaaaagacgctggtgctgaacaataacggtaaataccgcacttacaacttacgtggtgaaagagtgaaagatgaaaaaccacagttaagtttgttattgcaagtactgacagacgagaagcgttttatcgctaactgattaattataaatcagttagcgaaatatcttacttgcaatcggtgtggaaaacggtagtattaacagccacgagtcggcacgtagcgcagcctggtagcgcaccgtcatggggtgtcgggggtcggaggttcaaatcctctcgtgccgaccaaaaatcccaaaaaaaccaaccgtaaaggttggtttttttatatctgcatttaattcgataaacagaccgcgacacatcacggcctgtttattgtctgttatcagaacgtccagaccacacccgcctgggtattccacggcgattctacccctgcgccattgccatagctgactgacaaatgaccgcttaacgtcggggtaaacgatgaccttatcccagcctgataaacgccacgggttccagccacatcattattaaatttgccatcgtcattaactttcacctggttagaatcggcgtattcctgacgcacggcggctttcagccagggttccagcgtcgtaccgttttgcaggtccatgtgatagcttaccgccgttcccgcttcagcgcgtaatatccgggtatttcccacatccgcgcgcatgccgtttgataacgtgtagtcctgaccatctgtggtaaagccggtaaaggccagatagggtctaacactccacaatccgtcaacccaacggaacccgctctcgacatgagcacccgcgccgttactattgtaatcgccaaacgctgttgccccattactcatcttgccatggatggtgttggcaaaacggtcaactttcaccactccatcaacataggcaccgttctgatgctcccaaccggcataagcccccagggtatagctatcgacattgcctttgccgccgcgatcaaaaccaatatcagaatgagagtaaccaaagaacaagccgcgaattgtgctgctttcttcacgggagaaacggctatcgataccgagcgtcaggcccgtcaatgtttgctcaaaaccagctcccgcatcagtggtcacgttgttgcgggtgttaattgccgaactccacatcgccgtatcgtaactaacgccttttacgctaccaagacgctcacgcacggtgtccagttctgcatcaaataccagcggttgtgcggccgccatattcagcacatcagtggttgaaggggtaatttgcgcgcgattctctgccagactccagctatggttaccattatccagcaaggtatattcatacgtaccgatatcaacaacgcctccggcattgcccaacgtaaatgcagcatcaccgccgcccgttgttaccagtgtaaggctatctcctgctgccgggctggcaccggtgtccgtcacgaatattttgaaatcacctgttgcctgaccggtgacgttgagctgatcgctctgatgattcgccatatcggtacgcatataaaaattgccgtttcccgacagggtattggtggtcaacgtagtgaaattttccgcacttgccgtcacagatgaacgagtcactggctcatccatcataatcacatttgcgccagacatcgcaaggttagctaagttaaggcgggtgttttggttngtcgtagtgatatcggcaatgatggtccatgcgctattttcgagcgaaacatccgctttgctggtatccacggcaccatgcgttcttaaagaagcgccctcagaaaccactaccttacccaccaacattgcgggtgcataatttatttgcggcttcataacctcaagaatgccatcatttcctctgactgacacgttaaccattgtgccagcccagacgttagcgcggccattgttgataaccatattttcagagatggctttagaggaatacgttatacttccattctgatctgatcgaccgagatcatataccgcatttgcctgcactctcgtaccagtatcctttcccagcgattgcatagtggcatgctcatcgaggatagtgtcaatggcctgcgagtcctccataacaataagcccggaaccatcatccagttcataattttttgacacaccatcttttatactaaattggcctttactgtttgtaccactcacttccagcgcattcgttgagacaattaattttccgcctgcttttttatcaacgccagttgcagtcccgccatccataacctccagtaagccgccactatctacagtagtattataagcgaagtcattttcttcaactcgcaaacttccgccgttttccaacagcatattgttagcaataccattcttgatttcgaactgaccgagacggtttgttccgaatacctccatgacccgcgtgcttgctttaatagcaccgcctgctttctgatctaccgcaatcgctaatcccccctctttaacctccagtaatcctcccttttcgatagcggcaaggacggtaatcccatctttttcaacgattaagcgcccgcctttaatcgtgggatcattcgctgcgccataaacctgtagcacaccattattgagcgtagtctggtttgccgcgccacccatttgaacaatttgataaccatcatttaatactgagtattctgcggtgccattcatttcaatgtactgatacccgccgttaatttcagtattactacttataccaaattctttaatatgctgttctccgccaggattgattttcgtattattggcggtcccataaaccagctggatatctttttccaggacaacaccatcaactgtctcaccatactcaactgttgatgccaatgctatgggtgaatataacgctgtagctaccagaacagatattgcggaacgacaaagagaaacagaaccagattgatgcattgagctttcatcctatgaaattaattgcagttaaaagcattgggtacagaaaatacccatagctccatacccggagtcagtttttaaannnngtttaaagaaatgcacaagtattgtgattgattttttagttgtttttcttgatgagaagctgatgcaaaattccgtctttataatgaaaatgatgccaaagcgaacgacaaggttgtagttttcgctacatgtccatacataaaatggggtaacattcacgcgcctggtagcgttaccaacgctacgctcaaacataatgattctaataaaacctcaggagactactatgcctgaagcaacgccttttcaggtgatgattgtggatgatcatccacttatgcgacgcggtgttcgtcagttactggagcttgatcctggctttgaagtggtcgccgaagcgggcgacggcgcgagtgctatcgatctggcgaatagactggatatcgacgtgatcttgctggatctcaatatgaaaggtatgagtggcctggataccctcaatgccttgcgcagggatggcgttaccgcgcaaattattatcctgaccgtatcagatgcctccagcgatgtctttgcactgatagacgcaggcgcagacggttatctgttgaaagacagcgacccggaagtgttgctggaagcgattcgtgccggagcgaaaggcagcaaagtctttagcgaacgcgtcaatcagtacttacatgaacgtgaaatgtttggcgcggaagaagatcccttcagcgtgctgacggagcgcgagctggatgttctgcacgagctggcacaggggctgtcaaataaacagattgcctcggtgttgaatatttccgagcagacagtaaaagtacatattcgcaatctactgcgcaaactcaatgtccgctcacgcgtggcagccaccattctgttcctgcaacaacgcggggcacaataaaaatagcccgatggcatcaccatcgggcctctttttatttactctcctgcggcgacaaatgttgcatcgcctgcgcgatactacgttcaatcaccgcacggcgagtatcgttggcaggtaagagtttcaacatcatctcccacgcggcaacggcttcgccaaatcgctgctgctcaaaggcattaaacgcatacatgcttaacacacgaatattgctatggtccgttctcaccaactggcgcagcagttcgccgccgaggcggttgtcgttgggatcagatgaacgtgtcaacgcttcagcataacccagtgtggcatcgctgtttttcggatcgaggcgatacgcagtagcgtatgcatcggtggcgatactggcgttacccagcgccatgccaacgcgacccaacataatccaaccttctatatctcccggatttttttgcagttgagtacgcatccccagcgcaaggcgcgacatctnttcttcgttgagcggatcggctttcggatccagcgccctgtccagcaacgccggagcctgtgccgtggcctgctgccagattttcacctgctgataattgccagtctggtagtagctgacgccagccacaattaacgccaccacaatacccggcagataaacaacatatccggcacgcttaccttccggcacgctttgttcaggaaacgcttccggtaccacgcgtacccgacgccgcgaacgggcgtatatgacccaaccgccaataccaatagccactaccggaagcacccacagcagcacggtcagcggcgttaacggcggatcgtaagtgacgaagttgccgtaacgcgccaccatataatcgacaatctctttcttacttttgccttcctgcatcagttcatacactttctggcgcaggtcggtggcaatcatcgagttggaatcggcaatgctgttattctggcatttcgggcagcgcagttcttcagtgagctgacggaactgttgttcctgtgcttcatctttaaactgcaacacgtcgatggtcgccagcgctgagccggagatcatcagcatcagcacgcccaataaaaacctcattgtgcggcctccttactgtatttctcccacagcggcttgatctcttcttcccagacgcgaggattgagatcgcccgcatggcgatagcgaatgatgccgttgccgtcaataagaaacgtnnnnggcgcgccatagacaccgagatccagccctaacatgccatcgccatcaaaaaggcttagcgcgtaaggattgcccagctctttcagccagctgattgccttctggcgatcgtctttatagttcatgccgaccacgcggatgccctgcgcagaaagctgattcagatattgatgttccgcacggcaggtcggacaccaggtcgcccagacgttaagcagcactggtttgccctgagtcagcacatccgcctgataaaactgccccggattgtccagtgattcgagacgaaacttcggcacaggcttgccaatgagcgccgattccagattggtcggatcatccccttcggcattacgcgccagctgccacagcagcgccgcggcaatcgccaggaagataatcaacggaattaacaatactttgcgcttcatacagcctccggcgcagttttttgcgggctcacgcgcttacgatnnnnnnnatcaaacagacacagcagtccgcccaacgccatcatcagcccgcccgcccaaatccagcgaacaaatggtttgtagtaaagacgcacagcccacgcgccgttttccagctcttcaccgagcgcggcgtacaggtcacgcgtgatgccgccgtcaattgccgcttcggtcatcatcgacccggcagtgttgtaataacgtttttccgcatacagcaccgtttccggtttaccctctcgcgttacgccgatagtcgccacaccgccacgccagttcgggccagtcacctctttgacatcacggaaggtgaagcgatattcatgaatatcgacgctatcgccggacttcatgcgcacatcacgctcaacgctatagttctggctaaaggcaatgccaacaattgtcactgccagccccaggtgagccgccaccatcccccaataactgaaggtggttttcgtgccgcgtgaaatacgtagcgcagcttccgcaattgccagcaccgcaatccagcaggccattgccaggccgagcaccgtcatcgccacaactttgctttcgaacagccacggcaacagcagagacagcaccagcgtagagatgaaggcgataatcaataaattgcggattttacgtgggcgatcgcgcccccagcgcaccagaggaccgacacccagcagtagcgcaaacggcaccatcagccaggtaaacatggtgttgaagaacggttcgccaatcgaaatactgcccagtcccagttgcttgtgcaccagcggcagcagcgtccccagcaacaccaccagcatcgcggcgaccagcaaaacgttgttcgctaacagcaaagattcccgcgaccacagcgcattgtttacgcgtgagcgaactttgtgtccacgcgcggcaaacagcagcagcgaaccgccaatcaccagcaccataaaggcgaggataaacataccgcgcgccggatcagacgcaaacgcgtgtaccgataccagcacgccggaacgcacgaggaaagtccccaacagacacaacgagaaggcactgattgccagcagtaatgtccacgctttgaagctggcgcgttgttcagtgaccgccagtgagtgcatcagcgcagtccccaccagccacggcataaacgatgcgttttctaccggatcccagaaccaccagccaccccagccgagttcgtaataggcccatgcggaaccgagcacgatgccgagcgtcaggaagatccacgctgccagcgtccacggacgagtaaaacgcgcataagtgctgtccagacgcccgctcagcaaagaagcaatggcaaaagcaaacgccaccgagaaacccacgtaccccatataaagcagaggcggatggaagatcagccccggatcctgtaacagcgggttaagatcgcgcccttcaatcgggaagttcggcagcgtgcgtgagaatgggttagaggtaaagagaatgaacagcaaaaagccgacactgaccatccccattatcgccagtacgcgggccacaatatccagcggaatacgctgactaaaaatcgccaccgcaaaggtccagccgctcatcagcagcacccacagcagcagtgagccttcatgtgcgccccaggtagccgccacgcgataccacaccggaagctgggtattggagttgctggcaacataggtgacggtaaagtcgttgaccacgaaagcattgaccagcaccagaaatgcgccagccacagacataaacagcagccaggcaaacaatcgggaagacgccatcatgcgcgcatctccgcgcgccacgccccatagcggatacacggacagcagcagcgcaattcccagcgccaggcacagcagcccgttaccaatttccggcatcatgatgctgggtccttataaacactcgccgggcgacggtggttagcttccatcgctttctcaacttctggcggcgtgtagttttcatcatgtttcgccagcacttcttttgcgaggatatgattgcctttttccagctcgccctgcaccacaacgccctgcccttcacggaacagatccggcaaaatgccttcgtaagagacatccactgagccttcagcgtcgtaaatggtgaaggtcactttcagcgaattgggatcgcgctgcacactacccggcatcaccatcccgccaacgcgcagacgctgaccgacttccggcatctgctgagtttcacgcttgccgtagagaatttcccccggcgtataaaagagatcgatattcgagcgcagcgcatatagcaccagaccgatagtcagcgccagccctgccaacacggcacaggcaatccacaagcggtttttacggcgaatattcatgcagcctcctgctgttgcgcagcacgtaaacgcgcctcacgcgcccgctgttgcgccacaccacgcagaattgcgcgatgctgcatcaccgagtgcacgaccaaaaccaccagcggaataacggtcatcaccaccgccagccagacaaanaaggcgtaaccgcccattgcgaaaaattcattccaggaagcaaatgcaggggtcatttacggcctcttttcagtatcagttcactcacccacggacggcgtttttccatcagcaaaatcaaattacgcatccgcatcagcgtcagcgtggcagagaggagcaggaagccaaaaatcgaccagcgcagcggcgaacgcatcgccggatcgatactttgctgcatccgcgttgatccctgatgcagggtgttccaccantccacggagtaatgaataatcggcagattcaccacgccaatcagcaccaggatacctgccgcacggcccgccagacggcggtcgtcgaaggcgtgccacagggcaatcacacccacatacaaaaacagcagcaccagttcagaagtcagacgtgcatcccatacccaccaggtgccccacatcggttttccccatgcagagccggtaaccagggcaataaaggtaaacacggcaccaatgggggccatcgccgccaccgccaggttggccattttcatctgccagacaaggccaataaacgccgccaccgccattgatgcataaatgcccatcgaccagatcgccgcaggcacatgcaggtagataatgcggtagctatttccctgctgataatcagccggagcaaagccgaatccccagatccagccgacggtaagcacgactacactggcaattgccagccacggtataaaccagccacagatttgatacagccgtggtgggatcgccagttgatgcagtgttttccacatagtttcgataccagactcgaacaaaaatcagtaatccagcgttattgaatgctgattcgtaacgctgccgccgtcgcaaaaggacttaatgtcgcggtgcctgccagcaacgcgcctaaaattgccagatacccgtcaacgggcaaatgcatagaagccgcgtccatcgcggcggtggcaaagatgagtaatgggatagtcagcggtaacaccagtatgctgagcagcacaccaccgcgcttaagtcccactgtcagcgccacgcccggtgcaccgagaaagccaagcgtaggcgttcccagcagtagcgttaacgccatcacttgccagccataaacatccattcccagtagcattgctaccagtggcgaaaggatgagtaacggcagaccggttaccatccagtgcgccatcaccttcnccagcacaacggcgggcaagggtaacggcaacaacatcaattgttcaagactgccgtcctgcaaatcgtcacggaacagtcgttccagcgccagcaaggatgaaagcagcgcggcaacccagataatgcccggtgcaatacgtgccagcagttgcggctccggaccgatactgagcggaaaaagggtaattacaatcaggaagaaccacagcgggttggcgatttcagcgctatggcgaaacgctacgcgcagctcaagacggaaaatgcgccagaacatcatacggccctcgtttgcgtcagtgaaatgcggcgaattttactttcagcaacgttgagcggctggtgggtagtgagaatcacaatccccccctgctctgtatgctgcgccatacgctgggtcagacgatcgacgccgttaacgtcaatcgcggtaaaaggctcgtcgaggatccataacgtggcacgggtcagccacagacgcgctaaagcgacgcggcgttgttgcccggcagaaagttgatttaccggaatatcttcgaatccggcaagcccggcctgcgccagggcttccagacattgtgcggtatcgccatcgcgatgataaaagtgcagattttctaacgccgtcagccgggttttgatccccggctgatggcctatccataacaggttttgatggtagctgtcgcgtacctgatgcaagggctgcccttgccagagaacctcgcctgcgtcagggcgagacaaccccgtcagcaaacggagaagcgttgtcttccccgcgccgttgctaccggtgatttgtacccactctcctgcgttcagcgtaaatgacaagccactaaataaggttcgttcatcccgctcacaaagtaactctctgacttcaagcatacccacgcaataaccctgttaaaaacctggctcgacttcacgcatatcgggcagcttgtgcgctatccctttatggcaatcaatacaggtttgcccatctttcaccgcctggtcatgcatcttcgcggcaaccgatttctgggcggttgtatccatatactcgaagttgtgacagttacggcactcctgcgagttattgtccttcatgcgccgccactcattctgtgccatcgtcagacgatgagcttcaaatttctgcggcgtgtcaataacgccanaaattttaccatacagctctttacttgctttgagcttgcgtatcatcttcggcacaaactcgtgcggaacgtgacaatccggacaggtcgcacggacgccgctacggttgttgtagtgcacggaatccatgtattcctgatacaccgtgttacgcatttcgtggcagctaatgcagaactcttcggtattggctttttccatcccagtgttaaagccgccccagaagacgatgccgccgacaaaaccgatcaacagcagcgtccccagcgccagacggctgggggtacgccaccatttccacaggcgcttaatcagaccaggcttacggtcagaatttcccataataacctcttatttcccgtaaccttttgatggggtaaaggtattccccacgattggcgcggtatcggcctgcggtacgtgacattgcagacagaaataacgacgcggagccacttccgngcccactttgccgtcgctgtccataaagtgagtaggactgatacgcggngcgccagtggtgcgatagctttcgacaccgtggcactgcaagcagcggttggtattggtcgttacctgataaccttcaacgctatgcgggatcattggcggctgattcacatagttcagcggcatccgatcctgctcttttggcatccgaatggccccttcctgcgtcccggatacttccggcgactggctaaaatcgacgccattagccgcccaaaccgcgccgcttaccaccagggccagcatcgccgtccattgacacagcgctttcttcaggtcatggcttttcatgatttcgctcccgaactccatcgtgtagttattgtaaatacatcctcagaacagacatccacgcagcgaccgcacgtcatgcaatcgcggctggtgacctgcaccgggctttgttcatccagcaccggggcacgtagcacatgcggttccgggcaaacatgaaaacaatccatacagcggttacatttctgccgatcgctggccgcaacggtaatcacacctttgctacccagcacgccatacagcgcgccaaccggacaaatgtgcccgcaccagccgtgttcaacgaccagtagatcaaataaaaacagcgcgagaataagcagcgcgccgctgccgaagcccattaccaggctacgccccatcagggaaacggggttgatccattcccagatgagcgtgccagttaaggctgatcccaccagaatgaccaccaacagcacgtancgaatgtggcgagggatcgtcgcagactgattgaggtcaaagcgcctgcgtaaccagttcgctaagtcggtaatcgggttcagcgggcagacccagctgcaaaataatcgctttcctgccagggcgtagagcacggtgataatcaccgcaccggtcaacgccaccgtggcaggcagatgaccactggcaagactttgcagcgtcatcagcggatcggtcagcggaacggtgtcgaataacaggctactgctgtagttgccgtgcaagatccacacaccaaaccacggaccgctcaaaaacatccccagcacgaagaactgacaaaggcgacgtaacaccagccaacggtgactgcgccaccagccttttttctccagcgcctcgcgcccggcgtcacgtttacgatttgccattgttcccctccagccagccgaagcggtaatggtgacctaactcccctttcgccagtgacagcggtaacaccttgattgccggttgttccagcacgcatactttttcgcacttaccgcaaccggtacaggcgtcgctgtgaaccgtcggcagaaagcgggcgtgcttaccggtacgcgtgttgcgctccagctccagggtgatggcctcatcaattttcgggcattcgcgataacaaacatcgcagcgcagcccctgaaagttgagacagttttcctggtccaccagtaccgccagccccatccgcgcgtcgtcgatcgattcaatctcacgatccagcgcaccgctcgggcacactttggcgcacggaatgtcctcacacatttcgcaaggaatatcccgtgcgacaaaatatggcgtgcccgccgacaggccagaggccagcgtcgccagttttaaggtgtcgtaagggcaagcctgaacacactgaccgcaacgcacacaggcactggcaaaggcgttctcgtttatggctccgggcgggcgcaaccgcacgccagatgcgcgtgcggtttgctgttgtaaccccagcgccacacccacggcagccagcccgcctgctgtgcgaacgacatcgcgcagaaagcggcggcgaccattttgaggtttcgctgaccgggacataatggcttacaccttctccagtttgaccgcgcacttcttgaagtccgtctctttcgagagcggatcggtcgcgtccagcgttagtttgttaaccagctgtgcggcgtcgaagaacggcatgtacaccaggccctgcggcggacggttacgaccgcgcgtttcgacaatcgagatcacttcgccacggcgagaaaccactttcactttgtcgccacggcgcagatcgcgcgctttcgcatccagcgggtgaataaacaggaccgcttccgggaaggcacggtgcagttccggcacacggcgagtcatactgccggtgtgccagtgctccaggacgcgtccggtagagagccacaggtcgtactcttcatccggtgcttcnnnnnnnngttcgaacggcagcgcgaagatcaccgctttaccatccggtttaccgtagaacttatagccttcgcccgctttcacgtacgggtcgttaccttcgctataacgccactgcgtttctttaccgttcaccaccggccagcgcagaccgcgcgctttgtggtagtcatcgaacggcgcgagatcgtgaccgtgaccgcgaccaaaccatgcgtactcttcgaacagccctttttgcagatagaagcccagctcgcgggattcatcgttcagctgatcttccgccagttcggataccgggaatttgctcacttcgggggtggcatacagaacttcgtacagcgttttgccacgcagttccggtttcttcgccagcagctcttccggccatacttcttcagttttgaagcggcgggagaactggactaactgccagaggtccgatttcgcttcgcctggcgcctgtacctgctgacgccagaactgagtacggcgttcggcgttaccgtaagncccctctttttctacccacattgcggtcggcaggatcaagtcggcggccagcgcactgactgtcggatacggatcggagacgatgatgaagttgcgcggatcgcgccagcccggcatacgctcttcattaatgttcggcccggcctgcatgttgttggtacacatggtccagtaaacattcagcttgccgtctttcagcgcacggtcttgtgctaccgcatgcagaccgattttcgccggaatggtgccgctcgggatattccacttcttctcgcagatatcacgatgtttctcgttagttaccaccatgtccgcaggcagacggtgagcaaaggtgcccacttcacgcgcagtaccacacgcggaaggctgcccggtcagggagaacggaccgcaacccggctgggaaattttgccggtcagcaggtgcaggttgtagaccaggttgttggcccacacgccacgagtatgctggttgaagcccatcgtccagtaggagatgactttcttgttcggatcggcatacagctgcgccagttgttccagctgatcttttggtacgccagtcatttcagcggttttttccagcgtatactcagcaacgaaggctttgtaatcttcaaagctcatcggttcggaggcgtcagaacccggattcttcgctgctttttccagcggatgggtcggacgtaaaccgtagccgatgtccgtcgcccctttgcgcaggttaacgtgcttgctgaagaagtcctgatttatcgcattgttttgaatgatatagttggcgatgtagttcaggatcaccaggtcagattgcggcgtaaagatgatgccgttatccgccagctcgaagctacgatgctggtaggttgaaagcaccgccacggtgacgtcctggttagagagacgacggttagtgatgcgtgaccagaggatcgggtgcatctccgccatgtttgcgccccacagcacaaacgcgtcagcctgctcgatgtcgtcatagcagcccatcggctcatccataccaaaggttcgcataaagccaantactgccgacgccatacagtgacgcgcattcgggtcgatgttgttcgaacggaagcccgctttaaacagcttggacgcggcataaccttcccagatagtccactgaccagaaccgaacataccgatcgattccggccctttttctttcagggcggttttgaatttctcttccatcacatcgaaggcctgatcccaggtgattggggtaaattcgccttctttgtcatatttaccgtttttcatacgcagcagcggctgcgtcaaacggtctttaccgtacatgatcttgggcaggaaatagcccttaatgcagttcaggccacggttaaccggtgcgtccgggtcgccctgacaggccaccacacgcccctgctgcgttccgaccagaacgccgcaaccagtaccgcagaaacggcacggcgctttatcccatttaatggcttcctgctgaccaacaacggcgcgggcaacgcccggcacgctgagaccggcagccgccgcagcggccgcaacggcgttagctttcataaagctacgacgactgagtttcatggtgtttcctcaccttgctcttcctgctggtgataaaccagcgacaccgccagcacgccctctacgttgcgtactgactcaatggtttggatcagcgtttcgctgtcttctgcttccaccaccacaatcaactgaccgctcggcgcgtcgctgacagcaacttcacagccgggaaaggcgttcagttgggtgctgatgtctgaaattcgttcgcttttggcctgcacgaccaggctgcaaacttgccagttagtgtgcatggagatactccgcagttatggctgataccggacagctggctgcacatgctccacatccgttgcaaagttggctattaagttgcggctggtagatcccggagagcgtcgggcgaaagataattgccattggctcacagctatcctgacagcggcggcattcaactgactgatacgccaggcacgcgtccccaatggtgaactgcaaatcccaggccctggtgtggcgcggagaaaatagcgattcggggcaagcctgcgcgcaggcgtaacagaagctgcactcgttatttttgaaattaacgctcggatagccgcccgcgccgcgttgcagaatgttgttttcacaagcattaatacaggcgtcgcagcgggtgcaatgggtcagaaaatgagattcatcaccggaccagggcggacggataccgttactggctttgcgccagcgaccagtgagtatgccccgacgggatgcatcaatcttcacattgaccttccatcattaacgcgctctgaaaattgagagcgaccaaataaaccgcataattaataagccatttttatagccgctaagatattaaaggatgtgtcaaagatgcataccccgatcgaggtaaaacctgtagcaggatcaaaagagtggcgggaagcgtggcaaaaacgggcttttgctcacatttcaaatggttataaatatatttatatagcgattaattcaccagagatatttctgctggtttgctctctcatcagaatttaacactaaaagagcaggtaaaattgtctgaatattctttaagttattcataaagcaaattaataaatctgatgaatatgttaaccttcagcgacatcatcggtgcaaacctataaatgaagaaggaaagcaaaaaatgaagaccattctacccgcagtattgtttgccgctttcgccaccacttccgcctgggcggcagagagcgtccagccactggaaaaaatcgcgccttatccacaagctgaaaaaggcatgaagcgtcaggtgattcagttaaccccgcaagaagatgaatctaccctgaaagtagaactgttaatcggtcagacgctggaagtcgattgcaatttgcatcgtctcggcgggaagctggaaagcaaaacgctggaaggctggggctatgattattatgtctttgataaagttagctcgccggtttccacgatgatggcctgcccggatggcaagaaagagaagaaatttgtcaccgcgtatctgggcgatactggaatgctgcgttacaacagcaagctgccgatcgtggtgtatacgccagacaatgtagatgtgaagtaccgcgtctggaaggcggaagagaaaattgacaacgcggtagttcgctaaactgccgtgaagtgcggcaccccgtaggttggataaagcggtcacgccgcatccgacatctaacgcccgagccggttgcctgatgcgacgctggcgcgtcttatcagcatacgccacatccggcataccatgccggatgtggcacatcattacaacgcaatatccgccacttctttttgaacgggttgcggtttcaactgcggtttcggcgtactatctgctgcttgcggtttgtcgtatttcagccccagcacttcgctggtgtactgcaactcgcgttctgttgccgctacatcaccgttcagcttgcgtccataagatggaacgatcgctttcaacgtagcctgccattgcgggctggaaacgcgatcgccaaatactttttccagcagattcaacataatcggcgcggcggttgacgcccctggcgatgcccccaggagcgcggcaatggttccttgctggtcactgaccacttcagtacccagacgcagtacaccacctttatcggcatcacgcttgataatctgcacacgctgccccgcttgccacaaacgccagtcctcttttttcgcttgcggatagtactctttcaacgcttcaanacgatcctcttcactcaacatcacctgactcaccagatatttcaccagatcgaaattatccagcccgacgtgcatcatcggcatcacgttagaggtggtggtggaactcatcagatcccacaatgaaccgtttttgaggaatttggttgagaaggtggcaaatggcccaaacagcactacgcgtttaccgtccagaacgcgggtatcgatatgcggaaccgacatcggtggtgcgccaacggatgctttaccgtaaaccttcgccagatggtgattaaccacgtccgggttttccgaaacaaggaactgtccgcccaccgggaaaccggcgtagtctttcgcttccggaatccccgattcctgtaacagcttcagtgccgcaccgcccgcgccgataaagacaaatttcgcacggatgttctgtgcagtgccatttttcagatcggcaacggtaacggtccaggtgttatcgtcattacgctttagggcgcggacttcgctgctgagttgcagcgagaagttagatttcttctgcaaggaagcaattaactggcgggtgatctcgccgtagttcacatcggtaccaatttccgtacgcgtggctgccactttctgttgcggatcgcgcccttccatcactaacggtgcccactctttgatctgcgcgtgatcttcagagtaacgcataccgcgaaacagcgagctttgttgcaacgcggcgtaacgggcgcgcaggaaattgacgttatcctcgccccagacaaagctcatatgcggaacggtattgataaatgaacgcggagtacgcagcacgccgcgctcgacctggtgcgcccagaactggcgggaaatctgaaatgcttcgttaatggcgactgctttttcaatactgatgctgccatcggcgttttgcggggtgtagttcagttccatcagtgcagaatgcccggttccggcgttattccagccgttcgaactctcctgcgcgacaccctccaggcgctccaccatggtcatcgaccattcaggctccagctcgcgtaaataggtccccaacgtggcgctcataatgccgccgccaatcaacagtacatcagtttcctgctcctcggacgctttcgcttttgccgccatcgaaacggcattaagccccacggccatcgagaagagcatggcagtcacttttttcatcttgttaatgccttacttttagtcgctttattgcaggtgagatttgcgcggcatcaacggtaacacttaagtaacaacatttaaataatgnnnntnnattatattctaattttagaaacattataatttcgttgattaattatagggttattagaaatgaagggatttttagcatattgacctggcggcagcagtccgncaggtcagcgtcgtaatattatgccgtccgggcaacggcatcacgcgaagcggcatcgcgctcttcgcccgtcagctcgctaagttgcccgttgcgcatttccagcaggcggtcggcgtggataaagtaatgatcatcatgactgatggcgaaaatagttttacccatctcctgcatcagcggcagcaacacctgataaaactcacgacggaagtgtggatcctgatccgccgcccattcatccagcaggataatatcgcgttcttctgccagcgccagcaacagcgccacgcgttttttctgcccttttgataacttcaggttaacaatacgcccgtttcttaactcaagcttatgagccattttcagctgcgccagccacttctcaaccagttgcgggttagcgggtttaccctccggccccagcagttgatcaaacagccagacatcggtaaacactgccgaaaacagtttgcgataatcttccggttgttcgccgctgacaggtttgccatccagcaagatttcgccgctttgtggctgatacaagcccgtcaacaacatcgccagcgtcgattttccgctaccgttgccgccaatcagaaacagcagctcgccacgtttgatggtgagattaatcggaccaacggaaaacgcgttatcctgataagcaaacgtcacgttacgcagctccagcgtttgccagctgggaaacgcctgcgggcgcggaaactctgctttgaaaggcgcgagcgcgaatttgttcagcttgttaaacgccacctgcgccgtcagcagcgtcggcaatgcgccaaccgccgaaagcagcggcgtacgcaggaataaaagcgtcaacgaataggtcgcggcaacgttggtatcagcccaaccgagactgttcgccatccagaacaccaggccgatagcgcccagcatcatgatgtttgaccagttcacggcactaagatggaaggtgtctgcgcgaataatatgatggcgatactcttgcgcatcaggaatgtagaggttgttaaacacatactcggcgcgttcccggttcagagtcagctctttgcgcccttcaagtacagtttgaaaatccgtgtacagcttgtcttcggtttcacgcagggtcgccatatgtttgtacacccgcgccaccagcacaaaaccgccccagatggtgactgccatccagatagccgttaccagcaacattttgcccgacagcatccacagatacgccgctgaaccgatagtgagaatgatcccctgcaccagttccggcagacgcacaaaagcaatggtgatattgcgcacatcgctggttaatcccgccagcaacgaggcgctaccgagttgttcaatgcgctcgacgtgagtatccagaatccgcttgataaattcactacgcagtcggtaaacgaagtgatgccccaaagtggtgagcgccagttgcgatccgagagtgactgccatcaacagcagcaataatcccagaaactccggcaacaccagcagactggtatccgccgtttcgataaggcgctgattgataaaagcaattaagccaatgcctaaagccgcactggcgaggcttagcgccatcacactgataaatggccagcgatactgccgccagacaagtacaagaagttccatgcagaaaacccggacaatgaattacagcccgcagtttaaacatcttcgcgcgcacagcaataataattcttatttttattcttttttacctgcctgacggaatgtcaggttgtagcggcagtcggtggtgagtggatgaaaccccgctttcaacggttgaataccgtgataaaacagccgcgattcaccgccccataccaccacatcgccatgttccaacaacaaacgtttgagcggatcattacgtttcaggccaccaaattgaaaaatcgcgggtaagcccagagaaacagaaacaattggcgcgcgcagatccggttcgtctttatcctgatgcagcgacagtttcgcgccaggagcgtagcggttgataagacaagcatctggctggaaatctggatagcccgccgccgtagccgcacgttgacataaattatgaaaactctgcggcatggcgggccacggtttatttgtttgcggatcaatgggcgaatagagataaccttgccgatgggtcgtccagcccagatgcccacagttggtcatcgccaccgacatggtatatcccccgggggtgaccatctggcgaaacggcgactggctggcaacgtcattaatatcgcggattagttgctctgcagcgttaaaagcaaaacgccgtaaaattaccgcaccagccgccagtggctcttgccacggttcagcatcggcaaacagatccaacattacctctcctcattttcagcttcgcggcgcagcagttgcgctttacgcgacacgccccagcggtaaccggaaagtgtgccatcaccacggaccactcgatgacagggaattacgatagccagcttgttggcggcacaggcgctggcaacggcccgtaccgctttcggtttgccgatggcgttagccagttgctgataactgacggtttcaccgcaaggtatcgtgcgcagtgcctgccagacttgttgctgaaaagcagtgccgcgaatatccagcggtaacgtcagcggagtatcgcgttgattgaggctggcgatcacttcacgcacatgttgctgaaacgtcagatcggcaggcgcgttgtcggcagcgggaaacatctgctgcaactcgctgattaatgtcgcgtcatcatcgcccagcaatatcgcgcaaatcccccgctcgctttctgccaccaggcaacgacccagctcacaatcagccagcgcgtaacgcaccgccagattttcgccaccgtgacggaattgtttagccgtcatgcccagcgtttcatcggctttgtggtagtaactgctgctgtcggggaatccggcgttaagaatagacgtcgtcacgctctcccctttcgccagcgattcgcgcaaacggcgagcgcgccaggcctgttgccaggctttaggcgtcattccggtagtcgctttaaacaaccgatgtagatgaaatggactcatcgccacctggtcggctaaggcttccaacgttacaggcgtttcctgttccagcagtcgacacgcgtgggtgattttatccaaccgatgttgctgggcattggctttatcaggttggcagcgtttgcaggggcgaaatccggcggcgagtgcctcgctggcatttgcgtagaaggagacgttttcccgcaaagcatgtctggcgcggcaagacggacggcaaaagatgcctgtggtgcgcacggcgaaaacgaattcgccgtcggcattcgggtcgcgggctaagacagattgccagcgttgatcgtcagttaagcatgtggcgtttttcataatcagctccctggttaaggatagcctttagtctgcccggccaccatcacgcaaaaaccaacaatcttgcgctttaatttttttcgctgacaaggaagcttttaaactgtggtgacatccaggttttaaagctatcgccttctttggtgatcatataaaccgccagcccttcccggcgaacaacttctttggctttctccggcccgagtaccatcaaacctgtatcccaggcgtcggcttccagcgccgtcggtgcaatcaccgtcacggataccagattgtgttcgatgggacgcccggtttgcggatcgataacatgggaaagacgtttgccgtccagttcgtaatagttacggtagctgccagaggtgctaatcccatgaccgttgatatccaccacggcctgaaccgcgttttctttatcggttggtttttgaatcgctacccgccacggcaggccttcaccgttcataccacggctgttcagcgcgccgcccaccgacaccagatagcgggaaatcccttcctgctccatcaagcgtgccaggtgatccgccgcataaccttcgccgacggtggagagatcgacatataaatccggcaggtctttttgcagatattgctgatgcgactgattaatgaccgtaaggtgctgtaaaccagttttggctttcatcgcgtcgatctgttcctggctcggaatttgaaccggctgttgttccggaccgaaaccccacagattcaccagcggcccgacggttatatccatcgcgccatcggtcttcgcgccaatgcgtagcgaggtggtgacgatatcggccatcgcttcacttaccggccacggcgataaactttgcgagtcgttaaagcgcatcagcgcggaatcttttttataggtcgaaagcagctgatcgtcggcgtccagctgggtctgaatcttttctttaagttcggcgctgcgtttggcgtcaatgcccgggatgctggcacgccagaaggtacccatagttttgccttcaagaacggtaacttcagtagcgtgggttttggcgggttgtggtttttgatcgcaaccaacaaagaagagcgcggcagccagcagtgccacgcgggtaaagcttatttccatacgtgattatcctcatgcgaacggtcgcaagagtacaccaaaaaactgagtttgtacgctgaaaacaatgaaaaaagggcccgcaggccctttgttcgatatcaatcgagattagaactggtaaaccagacccagagctacgatgttatcagtgttgatgccagcgtcacgagtgaactggttgtcgtccagcaggttgattttgtagtcaacataggtggacatgtttttgttgaagtagtaggtcgcgccaacatcaacatatttcaggatatcttcgtcgtcgtagttacgaccattgatgacacccaggtttttacctttagactgcaggtaagccagggacggacgcagaccgaagtcgaactggtactgagcaacagcttcgaagttctgtgctttgttcgcccaacccagggaacctacgcgagttgcgttgtaggtctgggtgtactgagcagccagatagatgttgttagcgtcgtatttcagaccaccagtgtaggtttcagcacggtcgccgttaccgatgtacagcgggctgttctgatcatcagtacgtttggagctggaaactgcagcaccgataccgaagccttcgtaatcataagtgatagatccgccaacgccgtcgccgttctgacgcagtgcttcacgaccgttgttagtcatgccttcgccgcttacgctaccgtttttgccctggtactgaacagcaaagttcaggccgtcaaccagaccgaagaagtcagtgttacggtaggtcgcgaaaccgttaccacgctgctgcatgaagttgtcagaaccgtaggtgtcaccaccgaattctggcagaacgtcggtccaggaagttacgtcgtaaactacgccgtagttacgaccgtagtcgaaagaacctacatcctggaatttcagacctgcgaatgccacacgggtccaggagttgttttcgttttcagcgctgttgccctggatctgatattcccactggccgtaaccggtcagctggtcagtaacctgagtttcacctttgaagccaagacgcatgtaggtctggtcaccatctacagacttgtcgtcagagaaatagtgcaggccgtctactttaccgtacagatctaatttgttgccgtctttgttgtaaacttcagcagcgtttgctgcgcctgctaccagcagagctgggaccaggagggacagtactttaactttcatgttattaaccctctgttatatgcctttatttgcttttttatgccactgcatactgattaaccctcattaatcagtcggcaagtccattctccccaaaaatgcagaataatccaacacgaatatgatactaaaacttttaagatgtttcatttatcgctatagatgtttcaaaatgtaaattcgagggaactttttaagattattgcggaatggcgaaataagcacctaacatcaagcaataataattcaaggttaaaatcaataacttattcttaagtatttgacagcactgaatgtcaaaacaaaaccttcactcgcaactagaataactaccgctatcatcattaactttatttattaccgtcattcatttctgaatgtctgtttacccctatttcaaccggatgcctcgcatccggttttttttacccttctttacacacttttcattattctgtgctaccacagaaaaactataacgcttgttaactatttcacaaataattaacatcagcataatttccagcaatctttgtttatttgcaattattttcgttgggctttttgtaggttatttgtacagcaaaatggcgcttgtacatctatttcccccaatgcaggatgataaatatcacgggagaatagagaatcatcaatcaggtaagagtctggaatttcacactgtaccctttatactgccctatcacttnnnnaagttttaacaggtcataaacacgaatgcgtcagaaagagacaacggccacgacccgcttttcactcctaccggggagcattacccgcttctttttactgttgatcattgtgttactggtgactatgggtgtaatggtacaaagcgccgttaacgcctggctgaaagataaaagttaccaaattgtcgacattacccacgctatccaaaagcgcgtcgatacctggcgttacgtgacctggcagatctacgacaacattgccgcgacgacctccccctcctccggcgaaggtttacaagagacgcgcctgaaacaggatgtctactatctggaaaaaccgcgccgcaaaacggaagcgttaatctttggctctcacgacaactcaacgcttgagatgactcaacggatgtccacctatctggacacattgtggggcgcagaaaatgtaccgtggtcaatgtattacctgaatggtcaggataacagtctggtgctgatctcaaccctgcccctcaaagatctcacctccggatttaaagaatcgaccgtcagtgacattgttgattcacgtcgtgcagagatgttgcaacaggccaacgccctcgatgaacgcgaaagtttttctaacatgcgccgcctggcctggcagaacggtcattactttaccttgcgtaccacgttcaaccagccgggacatctggcaacggtcgtggcttttgatctgccgattaatgatttgatcccaccgggtatgccgctggacagtttccgccttgagccagacgcgacggcaacgggaaacaatgataatgagaaagaaggaacggatagcgtcagtatccactttaacagtacgaagattgaaatctcctcggcactcaactctaccgatatgcgcctggtctggcaggttccttatggcaccttattgctggatacgttgcaaaacattctgctgccactgctgctgaacatcggtttgctggcgctggcgttatttggctataccacattccgccatttctccagtcgcagtacagaaagtctacccaacacggcggtcaataacgaattgcgcattttacgggcaatcaatgaagagatagtctcactgctgccgctcggcctgctggttcacgatcaggaatcgaaccgcactgtcataagtaacaaaattgccgatcatttgctgccgcatttgaatctgcaaaacatcaccaccatggcggaacagcatcaggggattattcaggcgacgatcaataacgagctgtatgagatccgcatgttccgcagccaggttgcgccgcgcacacaaattttcattattcgngatcaggatcgcgaagtgctggtaaacaagaaactcaagcaggcgcagcgtctgtatgagaaaaaccagcaggggcggatgacctttatgaaaaacattggcgatgcgctgaaagaacccgcacagtccctggcggagagcgcggctaaactcaacgccccggaaagcaaacaactggcgaatcaggcagatgtgctggtgcgattggtcgatgaaatacagttagcgaacatgcttgcggacgatagctggaaaagtgagacggtgctgttctccgtgcaggatttaattgatgaagttgtgccttcagtgttgcctgccatcaagcgtaaaggtctgcaactgctgattaacaatcatctgaaagcacacgatatgcgccgnnnnnntcgcgatgcattacgacgtattttgctgctactgatgcaatatgccgtgacctcaacgcaattgggaaaaatcacccttgaggttgatcaggatgagtcctccgaagaccgcctgacgttccgcattctggacaccggagaaggcgtaagcattcatgaaatggataatttgcacttcccgtttatcaaccagacccaaaacgatcgctatggcaaggcggacccgctggcattctggctgagcgatcaactggcacgtaaactgggcggtcatttaaacatcaaaacgcgggatgggcttggtacacgctactctgtgcatatcaaaatgctcgcagctgacccggaagttgaagaggaagaagagcgtttactggatgatgtctgcgtaatggtggatgttacttcggcagaaattcggaatattgtcactcgccagttagaaaattggggtgcaacctgtatcacacccgatgaaagattaattagtcaagattatgatatctttttaacggataatccgtctaatcttactgcctctggcttgcttttaagcgatgatgagtctggcgtacgggaaattgggcctggtcaattgtgcgtcaacttcaatatgagcaacgctatgcaggaagcggtcttacaattaattgaagtgcaactggcgcaggaagaggtgacagaatcgcctctgggcggagatgaaaatgcgcaactccatgccagcggctattatgcgctctttgtagacacagtaccggatgatgttaagaggctgtatactgaagcagcaaccagtgactttgctgcgttagcccaaacggctcatcgtcttaaaggcgtatttgccatgctaaatctggtacccggcaagcagttatgtgaaacgctggaacatctgattcgtgagaaggatgttccaggaatagaaaaatacatcagcgacattgacagttatgtcaagagcttgctgtagcaaggtagcctattacatgaacaatatgaacgtaattattgccgatgaccatccgatagtcttgttcggtattcgcaaatcacttgagcaaattgagtgggtgaatgttgtcggcgaatttgaagactctacagcactgatcaacaacctgccgaaactggatgcgcatgtgttgattaccgatctctccatgcctggcgataagtacggcgatggcattaccttaattaagtacatcaagcgccatttcccaagcctgtcgattattgttctgaccatgaacaacaacccggcgattcttagtgcggtattggatctggatatcgaagggatcgtgctgaaacaaggtgcaccgaccgatctgccgaaagccctcgcagcgctgcaaaaaggaaagaaatttaccccggaaagcgtttctcgcctgttggaaaaaatcagtgctggaggttacggtgacaaacgtctctcgccaaaagagagtgaagttctgcgcctgtttgcggaaggcttcctggtgaccgagatcgctaaaaagctgaaccgcagtattaaaaccatcagtagccagaagaaatctgcgatgatgaagctgggtgtcgagaacgatntcgccctgctgaattatctctcttcagtaacgttaagtccggcagataaagactaatcatctgtaggccagataagacgcgttagtgtcttatctggcatttgcaccgattgccggatgcggcgtaaacgccttatccgtcctacgattcccattatttcaacagattacattaaagtaggccagataagacgcgtcagcgtcgcatctggcatttgcactgaatgccagatgcggcgtaaacgccttatccgtcctacgattcccgcgatttcctgaccctctcggcatataccgtcagcgtctgttttataacatccagcgttactggcttcgacaggcagctgtccataccggactccagacaccgctgcttctcttcagccaacgcattagccgttactccgattaccggcaacgtcagtcccaactgacgaatgcgttgtgtcaagcggtaaccatccatatttggcatgttgacgtcgctaagcacgatatcaatatgattcttgctaagtacattaagcgcatcgacgccatcattcgcggttttacattgatagcccaacgatcccaactgatctgccagcaaacgccggttaatcggatgatcatccacgaccagaatcatcatatcgtcattatcgctgaccgctttgtccgtcgacggcagagcgttagcaggatcgtcgctctccatctcgatcaaataaatacgcgccaacaatgccggtagctcatgcggagcagccacactgtgtacccactcccctggcgctttctccagcggaataccaatatgtcgacgacagaaggtcactaccgctctgccctgccattttttactcactacntcgtcagtgattaacacatcttcgggagtcggttcctgcccttcgtatgttgttacgacgatgccgctgcgctgcaaactggtttccaggaactgacagagcgacgcattgcggaccgccagccagcagcgtttaccactcaacccttccacgccttttttctgcgggtactgagcgccgtacaacggaatacgcacggtaaactggctgcccattcccggttctgaatctaccgagatatcgccgtccatcatgctgatcagtttttcacaaatcgccagacccagaccggtcccctggaagtttcgctgtacgcccgttccgacctggaagaagggatcaaacaagcgcaccacttctttcgccggaatccccacgccggtatcgcgaacacggatagagagataatcgccatcagcgcggacatgcaaaactatacagccggtatcggtgaattttatggcgttactcaacaggttggagatgacctgctgtaaacgcatcgggtcgccatttaaggccactggcacatccggttcaataaagcagtacaagcctaactgcttgcgtaccaccagcggtaaatagttggcggtgatgtggttcatcacttcacgcggtgaaaactcacgcggttcgatcatcaactgttccgattcaatcttcgagaaatcgagaatatcgctgataattttcaacaacaggctggaagagttgttcattgccgtcaccagacgatcgacgcctttcggtaactctttggtttgcaacagatccaggttaccgataatgccatacagcggcgttcgcagctcatgactgacggtggcaaggaacatcgattttgactggctcgcctgttccgctgcttgtgccatctcctgcaacgactcttccatcttcacgcgcgaagaaacatccaccagcacacaaatggccacgttttcattacgatagcgcgaatggacgaagctgatttgcagattggtattgttgctggtcaggacatcaacaaaattgacctgctgcccacagataatttgtgtcagtcgttggcggtcctcatgcgtaagcatattgagataggtatgcgccagttcgttacttaaaatattgacgccatcagcggtacgcaaaatgcagatacccactggcgcggaggcgacaatcttgcgattgaactgctcatgttcttccagtcgcagggcgtcgctttccgccggaatgaaaatacgtcgctcgtacatccgcgcgagagtaaacaatgcagctccggcaagcacattcagcaaaattgcgttaaggatcaacatgcgaatgcgttccagcaccttatcaaccggcaccgaatacacgatgctgagcgatgagggtggcagatttttnttcagcaccagctcccggaacccttccgtatagccaaaccaggagcgttcctgcatccagcgaggatcggccttaattttgctttctggtccggtaagcgaaatcagggtatgaccattttcatcaagaatggtaacccccatcggcaacgtacccggtaagaaaaagttctccatccggatggtctgctcgacacccaaaagcgcctgcaaccggttcgccagataaactggcgtcaacgcgtaaaaatacccgacgccagggcgcggaccttcgctgatccagtagaggttactgccgctatcatcttgtggtgcatttcgatatttattgatgcgttcatgcaaagctttcaacgcggtatcgcgttccactggcatatcacgcagaccgaaattggccatgcagaggttatcgctgccgattaaaaatacccggttgagatcgtaagccgcagaaaaattatcgcgccagtagcgcataaaccacgccaatgactccagagaacctcgccaggtgttactcattgctgaacaatcggagtcggcaaacagcggttcaaacgcaggcacatccgcctgcgtttctcgtccacgcggggaaagcacaccgttttctgccgataagcgattttcggcgatgtacttcagctctttcatcacatcagaggtgcgttgaataaagcgctgagcctgatcggaactcagattaaattcctgacgaatttccgattctcgctgatgtaacgcattaacgatgtaaaaaacggatgaaaaagcaatcaacagccagagcactaacgccaatgctctgaacatgtagcgcgaggctttcagggttgtacgaaaagaagcaaggtatttcaaaggggcgaagctccgcctcaggtgaccgatggagtgtggttaaggtagcggtaaaagcgtgttaccgcaatgttctgtcaccattgcaataatgcgtatcgcttagaaaccattgccttaaccaggaaagccggagtaaatggacagttctcagtacgaaaaataagaaatgaccaatctgccgacgcttgttaatggttatatcctggcgtcggcagatcgcccagcagtcttatctgaaaaaagaaagagccaggttgtgtgaagggatggatcaccagtcaaaacttttcaccagcgtcagctcgccagcattacgcatcggtacaataaatgtttcctgtttctcattgaccgatccttcatcggtgatcagcgtcagttgggcggtggttaattccgtttcgctgcgcccaccatagtagttgatatacacctgatagcgcccgtgaactggtgctggcatggcgaaaatctcgggtccgtacaccgtcgtgacatccatatccagtgcaccactgtttttcagcacggtgttaccgtaccaggcgtgttcgccatcgggcgtgacaacgtgaagatcgaggtcggtattgtccgtatcccacgagagaaccagccgtaaacgtgcacgaatcgttcctgtacccggcgttgagtaaaactgcattttttgtcggctttgcccatccgggctgatgacctgcacgctgttgctgccttcagtgaaaatataagggcgtgcaaatgaaccatcggattcaattctctgcggcatactggcaccgttgaccaccagccggccctgctgaactttacccgccgcagcataattctttattttgccgcggatctgcgctgagatattttgatcatctgccatgttgacggacgacgccgggtaattgatcgattgtgaaaaactggcatcttcgccctctgccggatgccagccagagagcggtgcgtcaatctcgacttcctgcacaccttcactgtgagcgacaggcgaaagcgccaccagtaacaacggaagaaaaatctttcgcatagcattagtccattaataattgtcgggtcagcgtttcgatatagttctcatcaagcccggtgggataaccatcaaaggccaggtgcagatactcatgggttaaatccagccgatcctgaagcgtaaagaagttacgaataaacagccgtttctgctgccgatcggtataggggaaacctgagactaaacgacngaccgcaaacacgtctggttcgttgtaccccgtctcgccttgtaatatacgccgccactgcggcatttttttcgccagccaggctttcgctttgggtaataactgacaggttgtgcgtggcgctccccagcggctaaggctgttgtcgggataagcaaacgcgagtatctggtcgtaacgctctccctgccccgcctgggccatggnttgccgccaggaaagcgtcccttcggtagcgcgactgccgtgataatgaaccggatcgcccgcatagatgagatcctgcgtccaggcggtcatcgttcgcgcccccgtggtagctggcgaagcagaaacacgctgcgtggcgctgctgtcggggatggtcaggcaatcgccttcccgattggcgttttgctgtaaaaaagtgcgtatcgccacagtcatggctttcgctgcctcaggtggcgtacttttcgcctcgcgatccagaactctggcaacgtactcttcacgatcgagatgcgactgcaatttcagtttgcccttttcggtcagtaaggtcgtctcaccgtggctgacaaacgtaatgtggttaccattggcaaacgtcacacgatagcgcccattaagtacgccgggttttactgccgtcgtactcttctccgctgtgattntcttcagcggctagcgcgcaaatagctccacctctacacattgcccactggcaacttgcgtcggcactggcaaaacccgattaagcaccgtcgcataacgggtcagtaccgttttgctggtgccactgccagtcacccacagcggtgtaccatcggttaaccagccagcaaaaccaccctgacggatttcctgtttatcatcggcaaaccagctccaggttttcacccgtacccgactaccgagcatagatgcgacaccgattttcgcntcgtccagcaccacatccagtaagacttcctgagctttgttttgcgcaggtaacgtcgctaatgaatcaagcagcgatttaaccgttaccgaggtttctggcttcagcgtagaaagagacgctaaccacgcaggtgcctgacgctgttgccagtattgcccccacacatctgccccaatatgcaaccgctgcggcgcaaaatagagcccacaggaacgtaccagcgcggtatcgcgcgttatgctctccccagcctgacaacaataaacntcttccggggagtttccgcgacactggtagggctgctccggttgatgggtatcctccagccaggcgtaaacatacagtttccataaactccctaacggcgtggtgagcgtgtcaggtaatgctgagactttggtcacgcctgatgacgacagctgatacagttgatcgtgctgcgcaccgcgcagcgccagttgtaacggcgtctcctccgcaagcgttggcagagtaaccaacgccaatagccagacgattctgcgccagttcacttatttcacctgcatcccggtccattcgctccctgccgcaacactttgctgtgcaggtgcataggaacgcacataacgagcaggaggcagaacgaattgccctttttgcgagaagcgcagcaaatggcggaaagtgaccgttcccgtcagttctttcaccggcaccatataggccagttcgcccatttcatttcgcgctttttccagcaattgcccctgctgttttccagcgttgggtttattgactgaaatgccccatgttgtgcgctcaacgtcggctcccggcgggagcggtacttccacctgaccatagcgcagaactgcatcctgctcgctggtaagcgtaatttcatcgagatacagcgcatcgctgtcaatctcattgctggtcaccggttgcagagtaaagctcatctcttcttcaccagggataagccgatacaattggcgttcaacggtcaccggaatgttactttgttgagccgtttttgccgcttcacgccagcggacctgcacattttgcggcgataattcgtcaccaaaagagagaatgtccggcacgccctgaccaacccaacgccagtattcgccccctccagttaacttatgtttggcccatgcgcccgcaggcgcaggcaacacaaccgaaggcattgtcgccatatatttcgccagccagtnnatggccagcnnnnnntcaatagtagattgctcagcggtcaaaccacttaaaatagcagccgcctgggtagcgtcgcccccgctattgagcagcacaaccgtgtgtgccagcggctgattgctgtttaccgctttatcccacgcatattgctgaacctgtggcatcaccgtggacttcaactgcgcttttttcagcaacgtcatggttaagacgtttgccaccgcatctgccagtggagattccggtgtatcgaggatcaggctgtcattgatatcgcgggtgtcttcctcagagaaatcttcagttttagttccgcgccgggcgatagcttcatccaaccctttcaacaacgttttgcacggcagattcatctcctgtgcccacgccagcaccagcgcccgatgcaataacggcatgttatctgcctgctcggcataactgtcgagcatatgctgccagtattccggttgttgcgttacgccgagcgcctggctggcctgccagtcggcgtaccatgcccatgccgtaaggaaggcgtcaccattgccatcttcaccccaccaggtaaagcgcgctccgggccccgccagttgcatcagccgcagacggttatcctgaatcatctgacgaatgtcgttagcggcggcactttgatgatcggcaagcgaacgccaggcgagactgagcgggatcagacggctaccggtgttgatcacnnnnnncccccacggttcatcgactaacgcatcaagattgttgcggaaaatctcctgcggcgtttcactactttgtagccggatattgctcgcctgctcgggcaacatcagcgcgttatcgccaccgccgagcatgacatttttctgctgttcaacgggccagctgttatccacaaaagacagttttgtgctaatgctgtcctgcacttgcccattttgttgcagttctgcgcttaacaagccagattgctgaatgttctgcgccagcgaaatataattcgcccctttgtgcagcgtcagcgtctggcgcatctcagcgcctgcaaatttagtcaccagcgccaccggttcgttatcctgctgactgaagataaacagtcctgccgacggtttgtcgcccacgcgatacaccgttggcatactccacttcatgtagagatttttttccgaacgcagataagcacgcccctgcccgaccagcccgtcgccgttcatcccacgcgcggtgatacgccagcgggttaacgaatcaggcatcaggaacgtgaaatacgctttgccttgtttatcggttgtgagtgacggcatccatgccgcggtatccacctcttcacgccgtggacgttcaagcatttttactcgccgctcgctgcggttagttgcgccaggcgcaaccggctcgctggagagtgcctggtcgtagctgataaacgacagactggagctggtacgcacattgttacgccccagcggatagaaaaatttgccgatattcggcgcgatttctggttgcagcgcgtanatcatttcatcgaccacgcntaccgttagctgcgcagaaacaggtttacctttcagcgacgaggttaattcgacattgaccagttcaccaggctggtaatgggttttgtccgttttcacccggatatccagctggggaacggcaactttgatcccggcgttctgaaaactgtactgaccgttacgggtatacagcaccgaaaaagtgatgttaggcgcaaaggaattgctcactggaacacgggcttcatattgagtatcgtttaaacgttgtaacgtcagccagtttgccggatgcgatagcagcgactgctgttcaacgcgatcgcgttccagcgtcaataatgcttcatcaattggctccgggaaggtaatcagcatcttcgcggtttcgccaggctggtacagcgttttatctgccacgatatctaccgtaccagtatgcgacatactgcccttaccgctgacggcatggcttaacccggcgagaattaagccgtctttatcgcgtaacgtcagattgtagttgccaggtttatcgaaattgacggtaaaggatttgccgcctgacggtagatctccgctatggctcgtgcggtcttcgagacgcaaccattcatacgtaacaggaacctgttttgaagattccagcgcggcataacggaacacaaccgactcgccgctattactgtattgtgcggcggtacttaaagagtaatgcgccaggccgcgttcaatgaggatctctttggtggtggtgacgcgatacgccgcgccgtcactggcggagacggttaacaaatagcgactcggtttatcggcggcggggagatttaacgccacatgaccgctggcgtcggacaccgtgtcgctgccttccagcgacacggggaaacgtccggcataacgcaaatagttaccgaccattgataattgctgagcgcgcaaacttaactgcacgcgggcattttttaccggctcgccatccgggtagagaagttgcagtttgccgctgaccgcttcgccagttttgaactcttttttgtcgagagctaaaccaatctcgaaatgtggcttgatgtagtttgccacgcgaaaactgctgctatagacctgattgcggtaagcaagacgtaactcataacctccggcaacggcattttctggcaggcggaaacttccctgcccgccattgcacgcatccagcgtgacatcgacggtttgcaacagactgccgttagcgtccagcaccgaaagcttcgccggggcgctgacgatgggggatgaatgcaacggatcgtggaactcgcggcccatcactttaacatcgacacgatcgcctgcgcgatatagcgggcgatcggtaaaaatatacaagcgggtgttgtagatttcgctttcgtagaagaagttctcggagacaaaaacgccgccttcagcatccttacccagaatgtatgaacgttctggcgatatatgttgtaactgcaaggtaccgctgtcatcggtcacaccgcgggtcatcacgccaagaccgtcagtccacaagatctctgagccgggcttcgcttcaccctgttttttacccgcggtccacaccagaagctctttgcctgacactttgctaagcgccacggtatcggaaacaaacaccaccgtcgtcgcccgatacccaccaaccatcgcctcgacgaggtacagtcccggctcttgttggccgagaggaatataaatgttacccggctgcggcgagatgaaattgctggatgcgccttccagttttaccccttgctgcggctcgaccggtttagcctgccatagtggataacggaactgttccaccaggggatattttttcagcggggaaaactggttgttctgtacataacgggaaggtttaataatggcattgccgagctgtaattcgggtaatgcctgagtcacattctgccgtgactgagaagagaaagtacgctgcatcacgcggcgagatttgccgtaccagttatcccacagccaggtcagcgtannnnnnagcccgtcgcccagatattgcggttgcaccacaatgcgatgcaggtttttctgctggcgcaaaaatgccatcgggtcaggaatacgatacaggcgaacgtccacgccgccgtactcttccatctgatagcgccgataatcacgccccggcgcttccagtcgcactttcgantcttcactgctgctaaaactgctgtcagcaagcaaaaagaatgttcccccggcgggcggcgcatagttactggaaggaagcgaatcatcagcattagcaagccctgttcccacaagagacagggacaagcacgctgctatcgcgccagaaaatttaaacgataaatgccaatgaaattgggattggaatcgttgggtatccatcgggtgtccttccatgtcataagttgttgcagactgactgcgcgcattccgttgtcagttttcgtggcgcttccggtgtggtagatgacgtaacgccccatccagaccattaagtgctgggcatcgccctgatcgaaaaaaatcatatcgccaggcagcgcctggtttatgtcctggccaataaactggctgttgtactgaatcaaattaatcgcggtcacgtaggggccggttttcccgttcccctgattccagttttgcgccagttgacgctgttcaggtgttagcgtcatctctggcggcaaatactggctagataaaccgttactttttagccatttactgtcgtgaactttcagcgtctcgttcgccgcaaatcgcaccaggcccgcacaatcctgctgataccagcgtggacttggcccctggcggagctgttnttgtgcaatgcgtacaaaccaggcgcgaaacagcccggattgttcgacattcagcatttcgctatgggcaacaacacaacacagccagcaaatcagcgccagcagcccgtgcctcatagcggctgccagattatgggtagccactgccaggcggcaccgggttccatctgggccagcttcatgacataacgcggttgttgagataaagcgtccagcttcggcattaataaagtttgtgcggcgttataaaaaaccggttcgagattcttcggcagactggtcaacgtttcgttacgcagcagtttcgccacgccttgtggattgatatagagcggaacgatgccatcagtgggtattacatccaccattgccgggcgggttttattcagtgtttgcagggcgttattaaccagcgtgtcatcgagggagaaaagcagcgttttgttttgcatcgccagcgacacgcggaaaaaataatccgacattaattgatcgggttgcgccgcctgcgctttcggatactgaccgtatcgggaactcacttcgcgacgccagatttgcgcttcgccctgctgagtctggcttaccggcaaaacaccttctggcgctttgctttcgtgcgcaccaatnttttgcgtaaacagtttccctggcaattgcgcctgttcggcagtgccatcaaactgaccgacaaacagcggggtttgcaattttgagtcttcataccagcacagccccgcggcaccgtccaacgccccattcaacttgtcgttttcctggctgatgtgcgaaagcatctcttcggcaataccgtgtgaatacggcaccgccacacagaagctggccccggcaggcatactgttccagaccggcgtaaaatcgaaactggcatctacgctggcggattcatcatttaacgccacaaaactgtgccagccgtcgttacccatttcgaagcgtacgccagcaaaagaaggcattaaccgctggtagccaaaacccagcaacctggcgctggccacgatgcgctggcgtactggcgttttttcggcagcacgctcttccaggccaaagctggcttgccagcgttttttgccgctcaacaaatcacttgcgatcgccgtggcttcggtatcctgctgatcatctttaaacagcatatccgtgctggaaaacaccagcatcttgtcctgatatgtcgcgaacatcagggcgttattgccgttatagcgcaactgataaacaggaatagtttcactatttatcttgatgctactgatttccgttttgcttaactggctgtcgctggtagcggcaaataacaatggctccagcagtttgcttaaaccactgcgttggatcagcaccatgtaatgtgaaagatggccttgtttatcgtgccatagcgccgcctgcgcgggctgatctaagagtgacgaaaagagcttatctttcagcgtgagatcgtgttcatagacaatgcgacgaatgctgccttcaatgcccagacgatcggcatgattctgataatagaaaacgaaatcttcactcagaacatcgtggagaaacggaatggtgaggagatctttgggaagctggcttagagaatcgctgtcgagaaagaggtccggctcattgagatcaatttgcaaattattgtgcaccaccagcggcgacaacgttttttctggcccactgccagcatattgcaacgcccagacgccagcggaaagcagtgctattgcgccaaaacctacaagaccatagaaccgccagcctttcgcnttttttcaccactcattgccacattccttgtgtatagccagccattttttacggacacagccaaactttaccgcgccctaatacgacaaaagcccagactttgcagcctggacttttcaattcaaaaaagggagatggctcccttttggcatgaagaagtaaaattattcttcttctggctcgtcgtcaacgtccacttccggagcgatttcatcgtccccttccgcggcactgccgtcgatggtatccagatcttcctcgtcaaccggttcagcaacacgttgcagacccactacgttttcatcttccgcagtacggatgaggatcacgccctgggtgttacggcccacgatgctgatttctgaaacgcgagtacgtaccagcgtaccggcatcggtgatcatcatgatctggtcgcagtcatctacctgtaccgcgccaacaactaaaccgttacgttcggtaaccttgatggagataacccctttcgtcgcacgcgacttagtcgggtattccgccactgcggtacgtttaccataaccgttctgcgttgcggtgaggattgcgccatcgccacgaggcacgatcagagagacgactttatcaccttcgcctaaacgaataccgcgaacaccggtggtgttgcagcccatcgcacggacagaagactctttaaagcgcaccactttaccttcggcggagaacagcattacttcgtcttcgccgctggtcaggtcaacgccgatcagctcatcgccttcaaccagtttgatcgccactttaccggcggtacgcagacggttgaactcggtgaggacggttttcttcacagtaccgttagcggtcgccatgaagactttcacgccttcttcaaactcggtcaccggcaggatcgcggtgatacgttcgtcctgctccagcggcagcaggttgacgatcggacgaccgcgcnnnncacgagtggcctccggcaactggtaaactttcatcgaatagacgcgaccacggctggagaagcacagaatatggtcgtgcgtgttcgccaccagcagtcggtcgataaagtcttcttctttaatacgtgcggcagatttacctttcccgccacgacgctgcgcttcgtattcagaaagcggctgatatttaacgtagccctggtgagagagcgtcacgaccacatcttcctgggtgatcagatcttccaggttgatgtctgcgctgttggcggtgatttcagtacgacgtttgtcaccgaactgttcacgaaccagctccagctcttcacggatcacttccatcagacgatcggcgctaccaagaatacgcagcagttccgcgatctgatccagcagctctttgtattcgtcgagcagtttttcgtgctcaaggccggtcagtttctgcaaacgcagatccagaattgcctgagcttgctgttcggtcaggtagtacagaccatcacgcacgccgaactctggctccagccattccggacgcgcagcatcgtcgccagcacgttcgagcatcgcggcaacgttgcccagctgccacggattagccaccagcgcagttttcgcttctgcaggcgtcggcgcatgacggatcagttcgatgatcgggtcgatgttcgccagcgccacggctaatgcttcaaggatatgagcacgatcgcgagctttacgcagttcgaaaatagtacgacgggtcaccacttcacggcggtgacgaacaaacgccgcgatgatgtctttcaggttcatgatctttggctgaccatggtgcaatgccaccatgttgataccgaaagaaacctgcaactgggtctgggagtagaggttgttgagcacaacttcaccgaccgcatcgcgtttcacttcaatcacgatgcgcataccgtctttgtcagactcgtcacgcagcgcgctgatgccttccacgcgtttttcttttaccagttccgcaatcttctcgatcaggcgcgctttgtttacctgatacggaatttcgtggacgatantggtttcacgtccggttttggcgtcaacttccacttcagcacgggcgcggatatataccttgccgcgaccggtacggtaagcttcttcaataccgcgacgaccgttaatgattgccgccgtcgggaagtccggccccgggatgtgttccatcancccttcaatgctgatgtcttcatcatcgatatacgccagacaaccgttgatgacttccgtcaggttgtgnggcgggatgttggttgccatacctacggcgataccggaagaaccgttcaccagcaggttaggaattttggttggcatgacgtcgggaattttttccgtgccgtcatagttatcaacgaaatcgaccgtctctttttcgagatcggccatcagttcatgggcaattttcgccagacggatttccgtataacgcattgccgccgcagagtcgccgtcgatggaaccgaagttaccctgaccgtctaccagcatgtaacgcagcgagaatggctgcgccatacggacgatcgtgtcataaactgccgagtcaccatggggatggtatttaccgattacgtcaccaacgacacgggcagattttttataggctttgttccagtcattgcctagtacgttcatggcgtaaagtacgcgacggtgtaccggcttcaggccatctcggacatctggcagcgcacggccaacaatgaccgacatcgcataatccagataggagctcttcagctcttcctcaatgttgaccggtgtaatttctctcgcaaggtcgctcatctaaccgctatccctctactgtatcccggattcaaaggtcgcaaattataacacagccgcgcagattgaggtaaacctatacgctttattcacatccaatgcctgatatactcgtttgtcttgccaattacggagtagaagtgccaatgaatgccgaaaaatcgccggtaaaccataacgtagaccacgaagagatcgctaaatttgaagccgtcgnctcccgctggtgggatctggaaggtgagttcaaaccgctgcaccgcattaacccgctgcgtctgagctatattgccgagcgtgctggcggcttatttggcaaaaaggtgctcgatgtcggttgtggcggcggcattctggccgagagtatggcgcgcgaaggcgcgacggtgaccggtctggatatgggctttgagccattgcaggtggcaaagctgcacgcgctggaaagcggcattcaggtggattacgtgcaggaaaccgtggaagagcacgcggcaaaacatgccgggcagtatgatgtggtgacctgcatggagatgctggagcacgtccctgatccgcagtcagtggtcagagcctgtgcgcaactggtgaaaccgggcggcgatgtctttttctcgacgcttaaccgcaacggcaagtcatggctgatggcggtagtcggcgcggaatatattttgcgcatggtgcctaaaggtacacatgatgtgaagaagtttattaaaccggcagaactgctgggctgggtagatcagacaagccttaaagagcgacatataaccgggctacattacaacccgatcactaatacttttaaactcggccccggcgtggatgtgaactatatgctgcacacgcagaataagtgaggttgttgtttggattcatccggcaaccgcgccaatgcctgatgcgacgcttgccgcgtcttatcaggcctacaaatgctctccgtaggcctgattaggcgtttacgccgcatccagcaatagtgatggtcagacagcgattaccatttcaccgtcatcgacaaaaaccctgccgtctgggcaaaatcatcactccctttctgccacgccacgctaccacgcagcgaaactcgctgactgatattgcccgtgactcccacttttatttcaccccgttgcttcaccgcatcgtcactgatagtgctggcatcttcttcaatttccgtcgaatggggatcgtgataataattcagatctaatgttggtatgacatgaacagcggtacgccattcgctgtgtaaacccagccgcgtctgaatatcatcaccctgcgattgtgacacgcgcgcacggttagcggcggtaaaatcatcctgctgcacgccctgataaatcacctgcgcctgcggttcaatcaccacaccacgccccggtaaccactgataccccgcttccagcgaggcgataatccccgacgaatggtaatgatccacgccatcttcatgttcagaaacatcattgctaaaccacgcgtactgcaaccagttatccagccaggccccctgcttctgcttaccgtgctgaaaccagcttgaggtcagcccaaccgcataaccgtggttctggttatcggcgcgagttccggtcatactcgagcggctgtcgccctggttatcgctgtagccaccaacaatcccaagcatccactcgccatccgtgccccagcgcccgctaaacagatcgccgctaagttgcaccgtagaagtgtcttcatgttgagccagttgccccgctgctgtgtaatgataatctccgccgataacacgtaaattcagcgtctgaccatcgccacctgcgtgatcgcgtcgctccatcataaacgcctgatttgccgcccgcaggttattgagataaccgccaactttggcattcaacaccggctggtaagcaggcgtaggttccgggtcgggtgttggatcaggatcctgcgtgggatcaggatcgggagtcgggtctggatcaggtggcgatggcggcgttacttcttgcgatcgcagataccagtcgttgttatcttccaccagcgtgtagtcatacgctcccatattgacgtagccgctgcctgccagactgaactgcgcattgttttgaaactgcgtgggatcagctgcgaaatcaaccactttaatgcctgtcgatgtcggctcaccaatccctgtaatggagttaaccaccacagttgtgttgccagcagtattaccgttcatcaccaattgatcgcttaccgagtcatcgccgtttaattcgctatcgagcagtagcgtaccgccgccggtataatcaccgtttaccgtcagcgtatcgccagcgacgccattttgcaggctaaccgcaccggacgtattggtcagattgccattaaccgtcacgttggaaagataagtcaggctgtcagtttcaaggttggtattaagctcacctgtcaacgtcacaccatcggtggcattcaccagcgtcccatcgcagttaaacagtgaggcattaagggcgacggaagtatcctgcccggtcaggcgcaaaaccgtaccatcgctgatgtcgatagtgccgctggaagtagcatcaattgactgaatatcctgatccgcgccagtaacgaacgttgccccgtcaccgacccatagcgacgaagcataagggaagatatccgcaacatcaccttgcagcgtgccctcttctactctcaccgctgactgcgttgtaccgctggcggtcagctccagtgtacccgcccccgttttagtcaatgtgctaccctcatcctgatgctgcccgctgctgtcagccatcagtgcgccccactgcgtgtctacccccgcatcaactgccacttcaccgtcggcgcgcatttcaatatcacgcccatgctcagtcgttgtagagcgagtatcgacattggcagtaatctccatcacgctttcttgtggcttatcggtaaagataacctggcggttataatgggtatctccaagctgcgagttgtcgctcaccatcagcgtaccggaagcgatttgcgttgtgccgaggtattgattgtcatttgccaggctgacctgcccgtcacccgcatcgatcaccacgtagacgccatctttcccgtcgccgccgatangcatatcgtttccgcctgcaagatctaccacatcctgactgccgataaccgttccgctgctgccactgacttcaaggccatctttgtatgatgtaccgctctgccaggtggagaaatcagagagatcgagcataccgccgtttaacacgatcgactgcggatcgtcctggagagcggcaagatctgccgcgtcgccttccagcgaaagcaccgcaccagcatccaccactatatcgccggttagcgccatcgactgcgnccccgccagcacatagctgccgttttgcncaatggtgagctgaccagcaccttcgatggtgccagcaaaactgccttgattaacagtaacattgccaccagcatcgatatttaaagtgccattctgaaagcccgtcaatgagtgcgcaaaggtttgttgggtggagccaacatttagctctgcctgattctggtacttatcaatactccctatcgtcagaccgtagcagtcttgcggatcgtcctggcaatgcgtatcgccgacattcatcagggagttgctgcggcccagggtaacttcaccgttttcaatctgcatctcaccagtaaagtcattgttatctgcattaagtaccagatcgccggaacctgttttggtgattaacccggtaccagcaatagagtcaacagctccgtcattctctgtattgccaataaccagcgtttttccgtcggcaatatcaaaggtaacttcacttaagccgagatacataaagccacccgccgcagaggaaggaccatctccatagcctgctgcgctattgttctcatcgactaacacgcctccgttctggctgtagctgtcatcaacagaaatatcaataagatagggagccgtcgcgctattggtatatatcgccccgccataaccttcggcagtgttatttgtaaaggcagtgttatttattatcgtataacctgaaggatgcttgctgtcgctattattatctgtgacatcgattgcgccgccatcgccatcactgtaacttgttgatgtatatgcctggttattgttaaaaacatcatcacttaaatagatatcattattgatggtataaattgcaccacctttgccgtcattagcgatgttattgcgaaacacggcgttagtgacacgtaaatcgatggcaccggtatcgttagtaccagaagaatagattgcgccaccatagccgcctgcgacgttaccagaaaaaataacatccgtaagattcagcgttgagttttctttagcaaatattgccccgccgttattatattctcctgaaacggtgttattggcaaacagagtcattccagtttcattttctggtgataatgtaaattccgctccttgttgcaaaaatacggccccaccgctggcattattggtcatatccgaaaaaaccagccattgcccatcggcgatactccagacctgcgtaatgcctgaaaggctttgcctgctggcgtgacaactcgctttgatatcatatccctggcataaatcaatggccgccgcgacaccgttagcagagaaaagagatgcaatcattgacgggagtagagataaatactccttgcgtagaaagataacccgcatattaatctgaccatcattttatataagacggcatatttaaacgcattatacaatatgggttatctttcttttgtaaattgtccaacccgatgcaatagctattttgttattatttgatgaatagtatcagtgcgtcataattcaagttaataaccttaagggataccagttatatttaaactaaattaaagtaatgaataattttcttataatataaggcaaattaacaaaatggcttcgcatttaacaataaccgaatagaaaacaaccatttcgacatcaacaatcgcttacattcgcttatatattgaccacaactgatacatcagattatgtgatgactcgtgcttagatcaatttttgcaatcattagcaaaaagattaataaaccatctatatcaatttatccaacctattctgccgttcaagaaatcgccgaacagttatttttaacaaatttttctcttcccattgactttcccggacaccttgtctgacctaaggtgcgcgaaagccactttttccttcctgagttatccacaaagttatgcacttgcaagagggccattttcacactatcttgcagtgaatcccaaacataccccctatatatagtgttctaagcagcttcccgtactacaggtagtctgcacgaaactattgcggaaagaattccaaaaacaggtacgacatacatgaatcagaatctgctggtgacaaagcgcgacggtagcacagagcgcatcaatctcgacaaaatccatcgcgttctggattgggcggcagaaggactgcataacgtttcgatttcccaggtcgagctgcgctcccacattcagttttatgacggtatcaagacctctgacatccacgaaaccattatcaaggctgccgcagacctgatctcccgtgatgcgccggattatcagtatctcgccgcgcgcctggcgatcttccacctgcgtaaaaaagcctacggccagtttgagccgcctgcgctgtacgaccacgtggtgaaaatggtcgagatgggcaaatacgataatcatctgctggaagactacacggaagaagagttcaagcagatggacacgtttatcgatcacgaccgtgatatgaccttctcttatgctgccgttaagcaactggaaggcaaatatctggtacagaaccgtgtgaccggcgaaatctacgaaagcgcccagttcctttatattctggttgctgcgtgcctgttctcgaactacccgcgtgaaacgcgcctgcaatatgtgaagcgtttttacgacgcggtttccacatttaaaatttcgctgccgacgccaatcatgtccggcgtgcgtaccccgactcgtcagttcagctcctgcgtactgatcgagtgcggcgacagcctggattccatcaacgccacctccagcgcgattgtgaaatatgtttcccagcgtgccgggatcggcatcaacgccgggcgtattcgtgcgctgggtagcccgattcgcggtggcgaagcgttccataccggctgcattccgttctacaaacatttccagactgcggtgaaatcctgctctcagggcggcgtgcgcggcggtgcggcaacgctgttctacccgatgtggcatctggaagtggaaagcctgctggtgttgaaaaacaaccgtggtgtggaaggcaaccgcgtgcgtcatatggactacggggtacaaatcaacaaactgatgtatacccgcctgctgaaaggtgaagatatcaccctgttcagcccgtccgacgtaccggggctgtacgacgcattcttcgccgatcaggaagagtttgaacgcctgtataccaaatatgagaaagacgacagcatccgcaagcagcgtgtgaaagccgttgagctgttctcgctgatgatgcaggaacgtgcgtctaccggtcgtatctatattcagaacgttgaccactgcaatacccatagcccgtttgatccggccatcgcgccagtgcgtcagtctaacctgtgcctggagatagccctgccgaccaaaccgctgaacgacgtcaacgacgagaacggtgaaatcgcgctgtgtacgctgtctgctttcaacctgggcgcaattaatagcctggatgaactggaagagctggcaattctggcggttcgtgcacttgacgcgctgctggattatcaggattacccgatcccggccgccaaacgtggagcgatgggtcgtcgtacgctgggtattggtgtgatcaacttcgcttactacctggcgaagcatggtaaacgctactccgacggcagcgccaacaacctgacgcataaaaccttcgaagcgattcagtattacctgctgaaagcgtctaatgagctggcgaaagagcaaggcgcgtgcccgtggtttaacgaaaccacttacgcgaaagggatcctgccgatcgatacctataagaaagatctggatgccatcgctaatgaaccgctgcattacgactgggaagctctgcgtgagtcaatcaaaacacacggcctgcgtaactccacgctttctgctctgatgccgtccgagacttcttcgcagatctctaacgccactaacggtattgaaccgccgcgcggttacgtcagcatcaaagcgtcgaaagacggtattctgcgccaggtggtgccggactacgagcatctgcacgacgcctatgagctgctgtgggaaatgccgggtaacgatggctacctgcaactggtgggtatcatgcagaaatttatcgatcagtcgatctctgctaacaccaactacgatccgtcacgcttcccgtcaggaaaagtgccgatgcagcagttgctgaaagacctgctcaccgcctacaaattcggggtcaaaacgctgtattatcagaacacccgtgacggcgctgaagacgcgcaggacgatctggtgccgtcaatccaggacgatggctgcgaaagcggcgcatgtaagatctgatattgagatgccggatgcggcgtaaacgccttatccggcctacggctcggtttgtaggcctgataagacgcgccagcgtcgcatcaggcacaggatgcggcgtgaacgcctaatccggcctacggctcggatttgtaggcctgataagacgcgccagcgtcgcatcaggcacaggatgcggcgtaaaatgccttatccggcattaaactcccaacaggacacactcatggcatataccaccttttcacagacgaaaaatgatcagctcaaagaaccgatgttctttggtcagccggtcaacgtggcccgttacgatcagcaaaaatatgacatcttcgaaaagctgatcgaaaagcagctctctttcttctggcgtccggaagaagttgacgtttctcgtgaccgtatcgattaccaggcgctgcctgaacacgaaaaacacatctttatcagcaacctgaaatatcagacgctgctggactccattcagggtcgtagcccgaacgtggcactgctgccgctgatctcgatcccggaactggaaacctgggtagaaacctgggcgttctcagaaacgattcattcccgttcctatactcatatcattcgtaatatcgttaacgatccgtctgttgtgtttgacgatatcgtcaccaacgagcagatccagaaacgtgcggaagggatctccagctactacgatgagctgatcgaaatgaccagctactggcacctgctgggcgaaggcacccacactgttaacggtaaaaccgtgaccgttagcctgcgcgagctgaagaaaaaactgtatctctgcctgatgagcgttaacgcgctggaagcgatccgcttctacgtcagctttgcttgttcctttgcctttgcagaacgcgaactgatggaaggtaacgccaaaattattcgcctgattgcccgcgacgaagccctgcacctgaccggtactcagcatatgcnnnannngctgcgcagcggtgcggatgatccggagatggcggaaattgccgaagaatgtaagcaggagtgctatgacctgtttgtccaggcggcacagcaagagaaagactgggcggattatctgttccgtgacggttcgatgattggtctgaataaagacattctctgccagtacgttgaatacatcaccaatatccgcatgcaggcagtcggtttggatctgccgttccagacgcgctccaacccgatcccgtggatcaacacctggctggtgtctgataacgtgcaggttgctccgcaggaagtggaagtcagttcttatctggtcgggcagattgactcggaagtggacaccgacgatttgagtaacttccagctctgatggctcgcgttaccctgcgcatcactggcacacaactgctgtgccaggatgaacacccttcccttctggcggcgctggaatcccacaatgtggcggttgagtaccagtgccgcgaaggttactgcggctcctgtcgcacacgcctggttgcaggccaggtagactggattgccgaaccgttagcctttattcagccgggggaaattttgccctgttgttgccgagcaaaaggcgatattgaaatcgagttgtgatcgggtactagcgccagatacgacgcttacgcgtattatctggcctacaacgattacatggcgtagtaatacgcttttacctgctcccagtccgctttggggatcggctccagatatttttccagctggcggaagtcatgattaatcgctttatcgcgacgcaagcggcgacgacttttctccagatcaagaaaaccagcttctgccttaccttctgttttcacatagatatggcgaacataacaacagccatgctgacgattaacgctatgcattttcttaaacgccagcgccactgctttcaacatggcttgccgtacttcgtcagaatagggcgttactgcatgctgggcataccagtcagcaatgctgatgaaccccgccatatcttcagtcaccagcaacgcgcgccattccccctcaattttcaccgcttcaccaaaaacgatcttcggcacgatgacaccggcccgttccagttctttaattaccgcaacctcacggacaatcgttggtcggccgaaaggataacgtacggaatgaaacagatgatgcgtcatgcgctttacatatagctttttgccgttgcgctcgacgcattgcaccccgctcataccattacggcgatagttaggctcttcaacccagtcgccctctgttgcccaccagtgattaaattcgtcgtgctttgctgaaactgccataccctatcgcctgtcattttttattaacgacaatgactataggtggttacctgcgaaaaatcttaatgaaacgtgtcgtattaatgaatttcttttgccactactagcgcgacaccgctttttcccttcatttgcagcgcatagactccaccagccactaccactaatagtgcgcccagcagataaatcattcggtagccagtatgtgcaaccatcatccccatcacacaggctcccagcgccaggcctgcatccatcgcattgaagaagagggagtttgcgacaccgattttatgcggttccactgaactgataatctgcgtctgaaaaactggcgtcacggaaccatacccgataccaatcaacgcgccagaaacgaccatcattacgctgccctaggtgtagccgagaaccaccagcccaaccgtaaagaacagcaggcaggggtaaaccacatatttcgggccttttttgtcgcaaacattgccggtgaaggtacggcagatcatcaggaagatggcgtagcagagcaggaaattactggccgccgacatcagattaagttcgcgggcgtaaagcgccagaaaggcagaaaccccggcatacgaaaaggtcataaagaatgtaaccatggcaaacggcaatgccgcgcgatcgaacatggcggcgaagcccatctttggctttgaaccgtcggcatggctgataaccggcggcacggtcataatcagcgacaggataatccccaccgccgcaacgccagtacataaccagaaagccatattaaaggcctcccagcgcgccatattcaggccaatccacggcccgaccaccattgccagccccattgccagagagaaaaaactgatgccctccccacgtcgggaggccgggatcagccgcgcggaaatcgttccctttaccgttgtgataaccccgaaggtaataccatgaagcaccctaataaaaagcagtgattctattgagtggcaaaaaggatacagcgcagtgaccaccaaaaaggccagagaagagagcaccagaatagttttattcgaatatttacccacccattgcccggcaaagggtcgaataacaatcgccgcaattaaaaataaagtcaccaacaaacctgctttatcaggagaggcatgcaagcggtcagagatataaattggcaacaatgttagtaaaacataaaagacgaagaaaataataaagctgatgatggttattgcccaaaaatccttcgtccataacttctctttcatactctaccgcctgtcaggatgacgcacgcagacaacactcccgttactgcggttgcgtcaaattgtgatgtactttgcagaacagaagtataaatggcggcatgctattagagaaattaatcgttttaatattattgattagcaaactctaatgactcttacccaaataaattctttactcgccgtgctggattacggtggctttactgaagccagcaagcgattgttcatgacacagtcggcggtaagtcaggcaattgctgccctcgaacaagaacttggtgtgaatatactgttacgcgatcgccgtaaagctatacaactgaccacagcaggtcaccgcattgtgcaacatctgcgcgccattaatcgggaagttaacgcagtaaaagagatagccgagcaggaaaagcagaaccctcaaagaacgctgagacttggttgtttccccagcgtctgcgcctgtatcttaccggttgtgattcgctactttgaaattcatcatccgaatataaaaattattccttttgaggaaaatagcacagcgattattgattcgcttcagaatgaatccattgatgccggttttgttcattttccggtgagcggaatgtactccgtgcccatttatcaggataaattcaccgtagtgttaccgcccaaccatgctctggcaaaaaacagcactattacagtggaagaattaatgggtgaaccattaatcattagtaaaggacgctatgaattaagcattatggcactatttaaagaaaagaatattaccccacagataaaatatgaatttaatcacccggatacagcgatcagttttattcgacagggattaggcatcgccttattaccagagttaacgctgaaaaccattgcagatgaattgtgttccgttcctctcgaaccaaccttctatcgacagatttcgttgctggctaaagaaaagccggtagaaggcagtccactgtttttactacaaatgtgtacggaacaactagtggtgagtggaaaaatttgatgtaagacatgagattgatgacaaatgcaagactgcctgattcgccacacttagttgtactatagcctttaccaggcgtaataattcgttttcacctgattttggcccactttgtgaattggcgatatatttatccagttgggagaagtgacaatgactccaggtagaaaccggtatgaagcgcccgactcactgtcaaaaccgattgttgagagtaatgacactccggcgaacagtacacagtttactctggagccattctcaatcttcaagtgggatacctaataacttgtcagggaagttatcaatatctgtttgttacttattaccgtatttattaacaataatgatactttctaacatgcgtaaaggtcttcgtaataaaatgagctaaatttgatagtgannnnnntctgcaaagattaaattgtatcttgttaactcacaatacaaggaatcatttatgccaaatacatctattcacttatctcgctgtaatattnnnnnnnnnaataaattgcaaccagcagaaatttacaaagaatcacaacaaaccgccaaacttgagtttttttgcgatgagtttctaaaaatatctcaaagtagatacgggttatcaacctcaacagacagcatagctaatttattggcttttttcacgaaagcctcagatgcaattgatagtatcaagacccaaaaaattgacgttcacagttatggtttcgtaccaataagacattttgtcgaacatgtcataacgtataaaaatgaatttgcagcggattatgaaccntatacccttacctttacccgaggtgaaaacaacgaaggtattttgagtgtcgaaagcaaagaagggtttatttcacaaagaacaataaacttaaatgaatatgaaactgcaattaacatcatcaatgaacatgttataaaagaaaatatccacaacacggtccagtcaccgacagaaaaatacatttcaaaaataaacagctctgataaaccttataaaaccagcagtaaggaaagtattaaaagtcaactttacagcgatcaaagaaatatacagacctgctactacattctgagaaaaaatacagaatggtacaaatacgcatcctccgaggaacgctatgataaattcaagaattcttctaaggaaattaaaaatacctacaagcaaattgtacaagcgcagaaaaaattgaaccaaatgaaatacatcaataaattaagtggtgagcttatcgatatcaccgacaaaaagttagcaccattaataaatgatagtttcagctatacacgagatttctttgcttactcaaaacaggaaaaaaatatcttcacatttgataattctaagtttgtagatccaaaggaaaaagaaggtttaatggtacaacacagcaatgggcaactggttattactggtaaatattgccctgaaggtgtgcaaacagcattcacccaagaacaatatgataaattaataagatacattaatattttctttacctttccgaaattagaataatactttacagtataaactgcattacaatttattattgagacctattcatactgtttaaagaataacaatgcccagtgttagcttttttaacgaatgagttttacgaaaattatgttggcatcttttttacaggacgcaccggttaatgaaaagaataaccggtagtagcattatttcgctttagcagaggatggcgcatgaacgccatcctgcagtagcagcattactctttattaaggaatttaaccgctttatcagggaaatcagtaaacaacccatttacacccgctttgttatacagagcatcatataactgattcacatcagttgtgtattcaggcagtttatctgaccgcacggtataaggatgcactaccagcttgttctgctgagcatcttgcaccatgccagtgagtttgatattacccggctgcgatgtctcctcaatcaacatatggtaatccggaccaataccatctgcatattccgccacctgtttcatggcacccggcttaaacatccagtcgtagttgtaattaacccagcttccgtccggctgtttctgctgcgtttcattccagtcggtataggcaatcagctgtaccagattgagatccatgcccattttgggttccagctcattcttaatacgcttcagctcatcagcatcaaaacattgcaaataaactttatcgtctttaccggtgtaaccatatttcttcagcacttccagcgtttttgccgcaatatccttcccttcctgatgatggaaccacggcgctttgatttctggatagataccgatatttttcccggtagagtgatttaacccctgaacaaattcaatctcttcttcaaaggtgtgcacccggaagtcggacttacccattgggaaacgccctggataagtctgcacttttttaccgttttcaatatcgaaaccttcggtaaatttcaacgacttaatttcatccagcgtgaaatctatcgcgtagtaacgaccgtctttgcgcgcccgatccgggaaacgatcggcaacatcagtaacacgatcgaggtaatggtcatgcagaacaaccagatggtcgtctttggtcatcaccaaatcctgttccagataatccgctccctgcgcatacgccatcgcttttgctggcagcgtatgctccggcaaatatccactggcaccgcgatgggcgatgactattttttcgttgctgtccgccgccattgcactgcttcccatgactatagtgctcatcatgatcgccatgctaaggtttttcagcgtcaatttcatgccattagcctccgttgcgtttttgcagtaattcctgatggcgacgtttttcgccaatcatcacaacaatcaacaagataaccgctagaatgctgccgccaatcattaccataaagccgccatcccagccgaagaagtccacggtgtagccaacaatcgcgctcgccgccaccgaaccgcccaggtaaccaaacagaccggtaaagcccgctgccgttcctgccgcttttttcggtgccagttccagcgcatgcagaccgatcagcatcacagggccgtagatcaggaagccgataacaatcatacaaatcatatcgacggttgggttacctgccgggttcatccagtaaacgatagtcgcgatggtcaccagtgtcataaagaaaacgccggttgccccacggttgccacggaagactttatccgacatccagccgcacagcagggtgcccggaatacccgcatactcatagaagaagtaggcccaggaggatttatccagcgcgaaatgcttaacctctttcagataagtcggtgaccagtcgaggatgccgtaacgcagcagataaacgaacacgttggcgatggcgatataccacaacagtttgttcggcagcacgtactgcatgaagatttgcttcgcggtcagctcctgttccgctttttcgttatagtcgtccggataatcatttttgtactcttcgatcggcggcaagccacaggattgcggggtatcgcgcatcatcgcaaaggcgaataatgccaccagaatggcgcagaaagcgggcatatagagcgccgcgtgccagtcattgaaccaggccatccccagcaggaacagcagcggcggaataccaccaccgacgttgtgcncacagttccacactgacacaatgccgccacgttctttctgcgaccaccagtgcaccatagtacgaccgcatggcggccaccccatcccctggaaccaaccgcagaggaacaacagtacaaacatcaccgcaatgctcgacgtcgcccatggcacaaagcccataaacaacatcactgccgccgccagaatcaaacctgcgggcaggaaaacgcgcggattcgagcgatccgataccgaacccatgatgaatttcgaaaatccataggcgatcgagatcccagaaagcgcaaaacctaaatcaccgcgtgagaatccctgctccaccaggtaaggcatagcgagcgcaaagttcttacgaaccaaatagtaagcagcatagccaaagaatatccccaggaaaatttgccagcgcaatcgacgataagtcggatcgatctccgcggcaggtaagcgcgctttgtgtggcgctggtttaaaaatactcaacattgaaagcctccgtggcccgtggtcttatttatgattaacagcctgattcagtgagagaacctgccgtttcttgagttgccgcgatgttaagaaaacattcataaattaaatgtgaattgccgcacacattattaaataaggtttacaaaatgttcaaaatgacgcatgaaatcacgtctcacttttgaattatgagcgaatatgcgcgaaatcaaacaattcatgtttttactatggctaaatggtaaaaaacgaacttcagagggataacaatgaaaactcgcgactcgcaatcaagtgacgtgattatcattggcggcggcgcaacgggagccggaattgcccgcgactgtgccctgcgcgggctgcgcgtgattttggttgagcgccacgacatcgcaaccggtgccaccgggcgtaaccacggcctgctgcacagcggtgcgcgctatgcggtaaccgatgcggaatcggcccgcgaatgcattagtgaaaaccagatcctgaaacgcattgcacgtcactgcgttgaaccaaccaacggcctgtttatcaccctgccggaagatgacctctccttccaggccacttttattcgcgcctgcgaagaancagggatcagcgcagaagctatagacccgcagcaagcgcgcattatcgaacctgccgttaacccggcactgattggcgcggtgaaagttccggatggcaccgttgatccatttcgtctgaccgcagcaaacatgctggatgccaaagaacacggtgctgttatccttaccgctcatgaagtcacggggctgattcgtgaaggcgcgacggtgtgcggtgttcgtgtacgtaaccatctcaccggcgaaactcaggcccttcatgcacctgtcgtggttaatgccgctgggatctgggggcaacacattgccgaatatgccgatctgcgcattcgcatgttcccggcgaaaggatcgctgctgatcatggatcaccgcattaatcagcatgtgatcaaccgctgccgtaaaccttccgacgccgatattctggtgcctggcgataccatttcgctgattggcaccacctctttacgtattgattacaacgagattgacgataatcgagtgacggcagaagaggttgatattctgctgcgtgaaggggaaaaactggcccccgtgatggcgaanacgnncattttgcgggcctattctggcgtgcgcccgctggttgccagcgatgacgacccgagcggacgtaacgtcagccgtggcatcgtgctgctcgaccatgctgaacgcgatggtctggacggatttatcaccatcaccggtggcaaactgatgacctatcggctgatggctgaatgggctaccgacgcggtatgccgcaaactgggcaacacgcgcccctgtacgaccgccgatctggcacttccgggttcacaggaacccgctgaagttaccttgcgtaaagtcatctccctgcctgccccgctgcgcggttctgcggtttatcgtcatggcgatcgcacgcctgcctggctgagcgaaggccgtctgcaccgtancctggtatgtgagtgcgaagcggtaactgcgggtgaagtgcagtacgcggtagaaaatttaaacgttaatagcctgctggatttacgccgtcgtacccgtgtggggatgggtacctgccagggcgaactctgcgcctgccgcgctgctggactgctgcaacgttttaacgtcacgacgtccgcgcaatctatcgagcaactttccaccttccttaacgaacgctggaaaggcgtgcaacccatcgcctggggagatgcactgcgcgaaagcgaatttacccgctgggtttatcagggactgtgtggtctggagaaggagcagaaagatgcgctttgatactatcattatgggcggcggcctcgccggattactctgtggcctgcagctgcaaaaacacggcctgcgctgtgccattgtcacgcgtnnnnnnnnngcgctgcatttctcatccggttcgctggatttgctgagccatctgccagatggtcaagctgtgacagacattcacagtggactggaatctttgcgtcagcaggcacctgcacatccttactctcttctcgggccacaacgcgtgctcgatctcgcttgccaggcgcaggcattaatcgctgnnnncggtgcgcaattgcagggcagcgtagaactgcctcaccagcggattacgccgctcggcactctgcgctctacctggctaagttcgccagaagtccccgtctggccgctgcccgcgaagaaaatatgtgtagtgggaattagcggactgatggattttcaggcgcaccttgcggcagcttcgttgcgtgaactcgaccttgccgttgaaaccgcagaaatagagctgccggaactggatgtcctgcgcaataacgccaccgagttccgcgcggtgaatatcgcccgtttccttgataatgaagaaaactggccgctgttacttgatgcgcttattcctgtcgccaatacctgcgaaatgatcctgatgcccgcctgcttcggcctggctgatgacaaactgtggcgttggttgaatgaaaaactaccttgttcactgatgcttttgccaacgctgccgccttccgtgctgggcattcgtctgcaaaaccagttacagcgccagtttgtgcgtcagggtggcgtgtggatgccgggcgatgaagtgaaaaaagtgacctgtaaaaatggcgtagtgaatgaaatctggacccgcaatcacgccgatatcccgctgcgtccacgtttcgcggttctcgccagcggcagtttctttagtggcggactggtagcggaacgtaacggcattcgagagccgattctcggccttgatgtgctacaaaccgccacgcggggtgaatggtataagggagatttttttgcgccgcaaccgtggcagcagttcggtgtaaccactgatcagacgctacgcccgtcgcaggcagggcaaaccatcgaaaacctgtttaccatcggttcggtgctgggcggatttgatcccatcgcccagggatgcggcggcggtgtttgtgccgtcagtgctttacatgccgctcaacagattgcccaacgcgcaggaggccaacaatgaatgacaccagcttcgaaaactgcattaagtgcaccgtctgcaccaccgcctgcccagtgagccgggtgaatcccggttatccagggccaaaacaagccgggccggatggcgagcgtctgcgtttaaaagatggcgcactgtatgacgaggcactgaaatattgcatcaactgcaaacgttgcgaagtcgcctgcccgtccgatgtgaagattggcgatatcatccagcgcgcacgggcgaaatatgacaccacgcgcccgtcgctgcgcaattttgttttaagccataccgacctgatgggtagcgtttccacgccgttcgcaccaatcgtcaacaccgctacctcgctgaaaccggtgcggcagttgcttgatgcggcgttaaaaatcgatcatcgccgcacgctaccgaaatactccttcggcacgtttcgtcgctggtatcgcagcgtggcggctcagcaagcgcagtataaagaccaggtcgctttctttcacggctgcttcgttaactacaaccatccgcagttaggtaaagatttaattaaagtgctcaacgcaatgggtaccggtgtacaacagctcagcaaagaaaaatgctgcggcgtaccgctgatcgccaacggctttaccgataaagcacgcaaacaggcaattacgaatgtagagtcgatccgcgaagctgtgggagtaaaaggcattccggtgattgccacctcctcaacctgtacatttgccctgcgcgacgaatacccggaagtgctgaatgtcgacaacaaaggcttgcgcgatcatatcgaactggcgacccgctggctgtggcgcaagctggacgaaggcaaaacgttaccgctgaaaccgctgccgctgaaagtggtttatcacactccgtgccatatggaaaaaatgggctggacgctctacaccctggagctgttgcgtaacatcccggggcttgagttaacggtgctggattcccagtgctgcggtattgcgggtacttacggtttcaaaaaagagaactaccccacctcacaagccatcggngcaccactgttccgccagatagaagaaagcggngcagatctggtggtcaccgactgcgaaacctgtaaatggcagattgagatgtccacaagtcttcgctgcgaacatccgattacgctactggcccaggcgctggcttaaactcctttctgatgcccggtaagcatgtggttaccgggcatttttgcgtacacgattccgtgcccaatgtatgcgttgcaacgcagtgaaaattcctctgaaaacgtctcgcaaaggctgaaactggcagatgtcaaaggcctgggataaccgtaatgtcgcgtcatcataaatatcaggtgacggacaaccatgaccgaatcaacaacctcctccccgcatgatgcagtatttaaaacctttatgttcacacccgaaaccgcacgggattttctcgaaatacatttaccagaaccactgcgcaagctttgcaacctgcaaaccttacgcctggaacccactagttttattgaaaaaagtttacgcgcttactactcggatgttttgtggtccgtggaaaccagcgacggtgacggctatatctactgcgtgattgaacatcaaagctctgcagaaaagaatatggcttttcggctaatgcgctatgccactgccgccatgcagcgtcacctggacaaaggctatgacagagtcccgctggtggtgccgttgctgttttatcatggcgaaacctcgccctacccgtactcactcaactggctggatgagtttgacgatccgcaacttgcccggcagttgtacaccgaagcttttccgttggtggatattaccatcgtacctgacgatgagatcatgcaacatcggcgtatagctctgcttgaactgattcaaaagcatattcgcgaccgcgatttaatcggtatggtcgacaggatcaccacgcttttggttagaggcttcactaatgacagccagctacaaacactgtttaattatctgctgcaatgcggcgatacctcccgtttcacccgttttattcaggagattgccgaacgttcaccactacaaaaggagagattaatgactattgctgaacggctacggcaggaaggacatcaaattgattggcaggaaggtaaattagaaggtttgcaggaaggcatgcatgaacaagctattaaaattgccttgcgcatgctggaacagggctttgatcgtgacctggtgctcgcggccacccagctaagcgaagccgatctggcagcgaataaccactaattaacacagtcccacagccgatccccatgggcctttgatatcaataactaccttttatgcgtggcccatttttgcctgatttaaacatcgccagtcgttgatccagggcatcgctgtagagcatcgtgtcaacgccaacagcgacaaagttcgctccccacgccaggcattgctgcgccatatcaggagccacagccagaaaaccagccgctttacccgcagcacggatccgccgaatgctggtttcaataattcgctgcacttccgggtgcccggcgttatccgggtagcccaacgacgcagaaagatccgcaggtccaataaacacgccatcaatcccttcgacgtcgaggatctcgtccaggttatccagtgccgttttactttccacctgcactaacagacaaagcgaatcgttgacttgcgccatgtaattctcaatgcgtccccagcgcgcagcccgtgctacactggccccaacaccacgttcaccgtagggaggatagcgcgtggcagacaccacctgacgtgcctgatcggcagtatcgaccatcgggatcagtagagtttgcgcgccaatatccaggacttgtttaatcagcggtttactgccttccaccggacggatcacgggttggctggcatagggggctaccgcctgtagctggtgataaagatcctgaatggtgtttggcgcatgctccccgtcaatcagcaaccagtcataaccggaagtagcggcaatttctgccatataggcagtcgttgagcttaaccacagaccaatttgcacttcgcccttgcgtaaacgttctttaangggatggttaataatgcgttcatcgtgttccttaacctatttaatgatgtgccacgtcggtctgcgcaacggtgcgatttacacgcagagtgaaaataatcagcgaaccgatgaccgccaccgctgccagcgtcagtaatcccgccgcatcgctggcaaataacgtttctgctttcacgcgcaggatcggggcaataaacccgcccactgcaccaaacaggtttacaaaaccaatccccgcagccagcgccgtaccggaaagcagttgtgtcggcatcgtccagaacaccggctgcacggcaataaacccgatggctgcaacacacagcgctacgatcgccagtactggagaaagcagcccggacagaccaataccaatgcccgccgccagtaatgtcagcgctgcgacattacgccgttcgccggttttatcggaatagcgcggaataagccaggtcccaaacaaggccgcaacccacggaatggcggtgaccaccgacgctgtaaagcccacttttgttcccagcaatgccgcaacctgggtcggcaggaagaaaattaatccgtaaaccgccacctgaatggtcaggtagataatcgccagttgccagactcgcccattacgcagcgcatcgctcagccgagaagtcactttctgttgttcttcacttgccagttgattgataagcaacgttttttctagtttactcagaaaacgtgcctgctccggtgtgtcatcaagccaaaagaatgtgaataccccagcgccgactgccaacaatccttcaatcacaaacatccagaaccagccgggatgccccataaatccatgcatctccagcagcgcgccggaaagcggtgatcccagtgttaacgccagcggtgcgcccatatagaacagccccataatgctggcgcgattacgctgcggaaaccattgcgaggtgagataaatcataccagggaaaaatccggcctccgcagcaccaagcagagtgcgaactatcagaaatttcgcttcagtatcggcccatgccatggctgccgaaagaaatccccacagcagtgttgtcgtaccaatccaggttctggcccccagtttgcgcatcaaaagattcgccggaacacccagaaacgcatataccacaaagaaaatgcctgctcccagcgcataagcttcattactcaacccggtatcaatctggtaggtctgtttggcaaaaccgatattcgaacggtcgagaaacgccagcacatacagcgccaacataaacggaattaaacgcacacggtttttcttcaccacggcgtcaagcaaagcggtgctcataaaaagctccttagaatatgtgggcgttaccgttgtcacagcaacgcccggagtgattagtgactgtaggggcgtttcaaattgcagtcacgattgagttcgacgccaaaaccgggtttatcaagcactgatttatgaatacgaccattcaccggaaccggctcattgagcagaatcgggtcaaactgcggacgcatcgttgaacaatccggactggtcatcaggaattcgctgaatggcgtattagtgaaggtgatcaccgcatggtgggagtaaacagacgaaccgtgcggcaccaccagttgccccctggatttggcgattgcggcaatttccaccagcgtggttaagccaccgcaccagccaacatccggctgcataatgtcgataccggtttctgaaagcgtacgaaaagattgcagtgtgccgtggtgctcaccgctggtgaccatcattccgactggcgcgttgcgtttcagttcgcgataaccttcatactgctgtggcggcaggcactcttcgatccatttcaggttatagggcgcgcaagcgtgggccagtttggtcgcatagttcacgtcctgactcatccagcagtcgagcattaaccagaaatcctcaccgcatttttcacgcatatccgcgaccatagcggcatctttgcggatccccgcatcgccatcatgtggcccccagtgcgtcggcattttgccaccgataaagcccatctcttttgccagatccggacgcgcacctgtggcgtagaactgaatctcatcacgaacagcgccgcctaaaagtttataaaccggaagcccgaccactttgccgaacagatcccacagagccagatcgacacaggaaatcgtgttcatcaccaggccaccagagccggagtaatacagggtggcattgagcatttgatcatggatcagtttgatatcactgacacatttaccctcaatgaaacggttaaggtgtttttcgacgataaaacagcccatttcaccggctgtcgaaacagcgaatccggtctggccgttttctgcttcgacttcaacaaccaacgtgccaagaacgttaatgccaaatgactggcgtaactgctcgtaatcgcggtatttactcatcggggtggcaatatgatcgtctatccagtgattcgccccctggtcgtgataatcaccgccgccagcgcctttttctgctgtcgcaccgccagtaaaccaggcgcgaacctgtttaatttttggtagggtcatgatgttctccattgttatgaggcttgtaagtcaaagggacttttccatcccaacagacgtgaaatatccctggcgcaggcaatggccttgcccgccagataatcacggtattcttcattgatttgtaagcgggtaccgaccaccgagatcgcagcggtaagctcgttattggcgttaaacaccggcgcagcgacacaacggacatcggcgtaatcttcgccgttgtcatagctccagccctgacggcgaatacgcgccagttcttcgtgaagttgctgtggatgagtaatcgttgtgggtgtcgcctgctcccagaccagcccttcgataatactttgctgtacagttgcaggttgccaggcaagcaggcatttacctattccggagcgataaagcgaaaggctttttccttcatgtgaacgcacgctgatagtggctgatgactccactttcaaaatgtaataagcgctgccgttatcaataatccccaggtgacataacagcccggtggtatccatcagttgcgtcaaacgcggtcgagccagttcccggagatccatcttgcttaacgcatgaccggaaagctccaccagcttggtccacaaacaaaaattttcctggtgatcaaggctaagaaaacgctgacgcctgagttcattaagcagcaaataggccgtgcttttagggatccccaatgtgtcaatgatcgtcgcagcattacaggggccaatgcgggcaatcaaattgagaatatcaatagcccgtgtcagggcgggaactttgcttgattccaacatactggactccagtcttagatactggaatcagtctcgttgctcagggggagtaaaattgtgaagcgcatcaaatcccgctcctcgtccaacggactggagaaattacgcacaaatttgtgaatcagcgcacggattttttcttattgagtacaacaggttggacaagttttgccggagggggaatgtgccggtgcagtaaaccggcacagagtggcggaatcagacggataaggtcatggactcaacaacctcaatccagccatgctcactggcaatgtcctggccgtttaaccaacggcgtagcatattcagtgccatcattgcgcacacttcctgacggatagccaggctatagcgtgtagtgctgaaacgcacacgcagagctaaagtgccatctggcgtggctagcgcaaagttgagatgctcgttctcgaaacccgaaacagccagtgccagcccggcaaaatggttggctcgccgttctgtaatccagtgcgcagtttgcgccagggtttcttcctgtgaaggaaccacttcacacgccagcagtggagcacctgcgcgagaaagttgcaaagccaataaaccaccggtgaattgctcgctcaacgtcaggctgaactggcggttttgcaattcgcgactgatctgcgcgggcagtccttcggtgccttcgaaaatcacgctctgtccggcaacacgtttaacgtccagccacagtttttccatcgcctgttgctcgcttgccggtccggtgagtttcagttcgatgatcggcattgaggagcgatagcccattgttacgcccggcggcagttgtagagtgtccaggctttgtgccagatcgctttccgaacgaccaaaggtagttaaacgcagacaaaccggcggctgtggtaaagaaaaacgctcgcgcagacgcggcaggatttcgtgctcgaccatcaccttaaattctgacggtacgccgggagtaaagaacatcaggcaacgattaagctgcacggcaaaaccacaggcggtgcctaccgggttattgataaattcagcactggcaggcagctccgcttgtttacggttgctcgatgccattactcgtccacgttcgtggaaatagcgttccatctctttgagccaggcttcatgcagcaccaggccttcaccttttgctgtcgcagcggcgagtgcgcttaaatcatcgctggtcggtcccagcccgccgttaacgatcagcacatcggcgtgctgactacgttcgcgaagaatggtgactaagtcatcaaggttatcccccaccgtattgcggcgagataatggcaacccctgatgaaagaaaaaatcggccagccaggcagcgttagtgtcaacgatttgcccgtgtaacacttcatccccggtggatagcatttccacttttaacatggttatctcctgcttttgttatcgaatcactataacgcaaagggagataaggcgtagtaagaaactgaatggcgcgacagaatgccgcgccggaagggatcagaaactggcgttaaccccaacatacgggccgtcagccacggcgttgtcgcggttaccgtctttacccgacagattcaggtagcgataacccgcctcaatactgactggacgcataatggtgtaacgcgcgccagcattcgcttcctcataacttttaataccgctggagagtgaatccggagagtagtaatactcgccaaacaaacggaagctgttgccaattttccactgcaaaccacctcctaccgctgcggcatagccttcatcgccgtaattcgggttggtgtaaacgccttttccgccaacggtcgccattaacggcccgagaggcagattcaaccccagccccacgcccgcgacgtcaccgtcgtcgtcgttatgtgtccagttaccgcttaaagccaggcccgtcgattcagtcccaaaaccgacaccaatattggtgtattctttacccgcctggccgctgatgctcattgcattgaccgatgcagaaaccaacagcattccggccagacctgctagcgcaatttttttcattatcccctttcccacaagcaattaatcaaaattcccaaagctgcgggattgtactgcctggcgcagaggattcaatgagcgaaaaaagggatctagtcacttattgtaactaaatacttcttaaataattaaacgccgaaaaaataaacacagtttaccgatacacacaaaaataataataagtgcagttatcatcgcaaaaganattactgtcactttcacatatttctgagttaccgtattctcatggtttctttttatttataaggaatacccctgtgcgacaacggactattgtatgccctttgattcaaaatgatggtgcttatttgctgtgtaaaatggccgacgatcgcggcgttttccccggtcaatgggcgctttcgggtggcggcgtggagcccggcgaacgaattgaagaggctctacgccgcgaaattcgcgaagaactgggagaacagctgcttttgacagaaatcacgccctggaccttcagcgatgatattcgcaccaagacgtatgcagatggtcgcaaggaagaaatttatatgatttacctgatttttgattgcgtttctgccaaccgagaagtgaaaataaacgaagagtttcaggactacgcgtgggtaaaacctgaagatctggcgcactatgatttgaatgtcgccacccgaaaaacgttacgtttgaaaggtcttctgtaacaatgatgacagccattactggctgtcagattgaaaatttagtgattaacgaattccccatccagataaactttgcctttttccacatgcatgactaaaccatccagataatcaggtttaaatgtcgcatcacgcttatctttagcaatatatgtcaggcaatgattatgggtgaaaataacgatatttttatcaggcgctttgctttgtaagtccttaatcgcactataaatctcattaccgcactgaagaagtcgtttatctaccgtcaattttttacccgctgaaaaccaggtcgcggactgaatggtccggacggtattactggaataaagatcgaaatcagggatatcagcactaaaagcgttgcccagttcacgggcatcctgggtacctttaaccgtaatacctgttttatctgacaagcattgattggttgaacgatcgcaacgttcagcatggcgaaacaaaacgacaaccgggtgctgctgtgccagtctgcccagcgttttattgtcgatacgtggcaaaccattgctactccaggcggcatgagtacccagtccggcaattgcagcgagcgccagtaaaatgatgaaatatttttttgacttcaatgatgagcggcaaaaagctaacacgtaaactccacctatagacaagcgcaaccagacaattaccgtgaaattgagcgacatttctggcgataattagcagttggtgtaatattaaaaatcctacgatgctggcaaaatgcctcaaaattnngccaaatgcaaagcctaaataagaaaaaatataaannnnnnnnnatttacgtctaatattagtttcttaaggttaagttaatattctatccttaaaatttcgctctaaatggcaaaatatacacaacactctttatagcaaatataagtggacaggtattcaatggcggaaggaaaagcaatgtcagaatttttgcctttttcgcgaccagcaatgggcgtggaggaactcgctgcagttaaagaggttctcgaatccggttggatcacaaccggtccgaagaatcacgcgcttgaacaagccttttgccagttgacgggaaatcagcatgccatcgcggtcagttcagccaccgccggaatgcatatcacgctaatggcgttggaaattggcaagggcgatgaagtgattacgccttccctgacctgggtttcaaccctcaatatgatttccttgcagggtgcaacgccggtaatggtggatgtcgatcgcgatacgctgatggtcacgcctgaagcgatcgaatcagccattacgccacgcactaaagccatcattccggtgcattatgccggtgcgccagcagatattaacgccattcgcgccattggcgaacgttacggcatcgcagttatcgaagatgctgcccatgccgtaggtacgtattacaaagggcgacatattggcgcaaaaggtaccgntattttttcatttcatgccattaaaaatattacctgtgcggaaggaggcctgattgttactgataatgaaaatattgcccgccagctacggatgctgaaatttcanggcctgggtgtcgatgcctatgacagacaaacctggggccgtgcaccgcaggctgaagtcttaacgccgggctataagtacaatctgaccgatattaacgccgcgattgccctgacacagttagccaaattagagcacctcaacacccgtcggcgcgaaattgcccagcaatatcagcaagcactggcagctctcccctttcagccattaagccttcccgcctggccgcacgttcacgcctggcatctgtttattattcgtgtcgatgaacaacgttgtggtatcagtcgcgatgcgttgatggaagcgttaaaagaaagaggtattggtaccgggttacatttccgcgccgctcacacacaaaaatattatcgcgagcgttttccctcgctgtcgttaccgaataccgaatggaatagcgaacgcatctgttctttgccgctgttcccggatatgactaccgccgatgccgaccgtgtcatcacagcccttcagcaactcgcaggacaataagccatgtttgaaatccaccctgttaagaaagtctcggtggttattcccgtttataacgagcaggaaagcttaccggaattaatcaggcgcaccaccacagcctgtgaatcgttggggaaagagtatgagatcctgctgattgatgacggcagtagcgataattccgcgcatatactggtcgaagcctcacaagcggagaacagccatattgtgtctattttgcttaaccgcaattacgggcaacattcagcgattatggcgggattcagtcacgttactggcgacttaattattacccttgatgccgatctccagaatccgccagaagaaatcccccgcctggtggcaaaagccgatgaaggttacgacgtggtagggactgtacgccagaaccgccaggacagctggtttcgcaaaacagcttcgaagatgattaaccggcttattcagcgcaccaccggcaaagcgatgggtgactacggttgtatgctgcgcgcctatcgccgtcatattgtcgatgcgatgttgcactgccatgaacgcagcacctttatcccgattctggcgaatatcttcgcccgccgtgccattgaaattccagtgcatcatgccgagcgtgagtatggtgaatccaaatacagctttatgcgcctgattaatttgatgtacgacctggtgacctgccttaccacaacgccgctacgtatgctgagtctgctcggcagcattattgcgattggaggttttagcattgcggtgctgctggtgattttacgcctgaccttcggaccacaatgggcggcagaaggcgtctttatgctatttgccgtgctgtttacttttattggcgctcagtttatcggcatgggattactcggtgaatatatcggcaggatctacaccgatgtccgcgcccgcccccgctattttgttcagcaagttatccgtccatccagcaaggaaaatgaataatgaaaaccgtcgtttttgcctaccacgatatgggatgcctcggtattgaagccctgctggctgccggttacgaaattagcgccatttttacccataccgataatcccggtgaaaaagccttttatggttcggtggctcgtctggcggcggaaagaggcattccggtttatgcgccggataacgttaatcatccgctgtgggtggaacgcattgcccaactctcaccagaggtgattttctctttttattatcgccatcttatttgcgacgagattttgcagctcgctcccgcaggtgcatttaatctgcacggttcgctgttaccaaaatatcgtggtcgcncgccgctgaactgggtgctggtgaacggtgaaacagaaactggcgttacattgcaccgaatggtaaaacgtgccgatgccggggccattgtggcgcaactgcgcgttgccattgcgccagacgatatcgctattacgctgcatcataaattgtgccatgccgcgcgccagctactggaacagacattacccgccattaaacacggtaatattctggaaatcgcccagcgcgaaaacgaagccacctgttttggtcgcagaacgccggatgacagtttcctcgaatggcataagccggcatccgtactgcacaacatggtacgtgccgttgccgatccgtggccgggtgccttcagctatgttggcaatcagaaattcaccgtctggtcgtcgcgtgttcatcctcatgccagcaaagcacagccggggagcgtgatttctgttgcgccactgctgattgcctgtggcgatggcgcgctggaaatcgtcaccggacaggcgggcgacggcattactatgcagggctcgcaattagcgcagacgctgggcctggtgcaaggttcacgcttgaatagccagcctgcctgcaccgcccgacgccgtacccgggtactcatcctcggggtgaatggctttattggcaaccatctgacagaacgcctgctgcgcgaagatcattatgaagtttacggtctggatattggcagcgatgcgataagccgttttctgaatcatccgcattttcactttgtcgaaggcgatatcagtattcattccgaatggattgagtatcacgtcaaaaaatgtgatgtcgtcttgccgctggtggcgatagccacgccgattgaatatacccgcaacccgctgcgcgtatttgaactcgattttgaagagaatctgcgcattatccgctactgcgtgaagtaccgtaagcgaatcatcttcccgtcaacttcagaagtttatgggatgtgtagcgataaatacttcgatgaggaccattctaatttaatcgtcggcccggtgaataaaccacgctggatttattcggtatcaaaacaattacttgatcgggtgatctgggcctatggcgaaaaagagggtttacagttcaccctcttccgcccgtttaactggatgggaccacgactggataaccttaatgcggcacgaatcggcagctcccgcgcgattacgcaactcattctcaatctggtagaaggttcaccgattaagctgattgatggcggaaaacaaaaacgctgctttactgatattcgcgatggtatcgaggcgttataccgcattatcgaaaatgcgggaaatcgctgcgacggcgaaattatcaacattggcaatcctgagaacgaagcgagcattgaggaactgggcgagatgctgctggcgagcttcgaaaaacatccgctgcgccatcatttcccaccgtttgcgggctttcgcgttgtcgaaagtagcagctactacggcaaaggatatcaggacgtagagcatcgtaaaccgagcatccgcaatgcccaccactgcctggactgggagccgaaaattgatatgcaggaaaccatcgacgaaacgctggatttcttcctgcgcaccgttgatcttacggataaaccatcatgaccaaagtaggcttacgcattgatgtcgatacctttcgtggcacccgtgaaggcgtgccgcgtctgctggaaatcttgagtaagcataatattcaggccagcatttttttcagcgtcggcccggacaatatgggccgccatctctggcgactggtgaagccacagtttttgtggaagatgctgcgctcaaacgcggcatcgctttatggctgggatattttactggcaggtacggcctggccaggtaaagagattggtcatgccaatgccgatatcattcgtgaagcggctaaatatcacgaagtcggcctgcacgcctgggatcaccatgcctggcaagcccgtagcggtaactgggatcggcaaacaatgatcgacgatattgcacgcggccttcgcactctggaagagattatcggtcaaccggtaacctgttctgccgctgcgggctggcgtgccgaccagcaggtgatcgaagcaaaagaagcgttccatttgcgctacaacagcgattgtcgtggggccatgccgttccgtccactgctcgaatcaggaaaccctggcactgcgcaaattccggtgaccttacccacctgggatgaagtgattggtcgggatgtgaaagcagaagattttaacggttggttactcaaccgcatcctgcgagataaaggcacgccggtttataccattcatgcagaagttgaaggctgcgcttatcagcataattttgtggatctcctcaaacgcgcagctcaggaaggcgtgacattttgccctttaagcgaactgttatcagagacgttgccgctcggacaagttgttcncggaaatattgccggacgtgaaggctggctgggttgccaacaaattgcgggtagtcgctgatgaaatcggtacgttaccttatcggcctcttcgcgtttattgcctgctattacctgttaccgatcagcacgcgtctgctatggcaacccgatgaaacgcgttatgcggaaatcagtcgagaaatgctggcatccggcgactggattgtgccccatctgttagggctacgttattttgaaaaacccattgccggatactggattaacagcattgggcaatggctatttggcgcgaataactttggtgtgcgggcaggcgttatctttgcgaccctgttaactgccgcgctggtgacctggtttactctgcgcttatggcgcgataaacgtctggctctactcgccacagtaatttatctctcattgtttattgtctatgccatcggcacttatgccgtgctcgatccgtttattgccttctggctggtggcgggaatgtgcagcttctggctggcaatgcaggcacagacgtggaaaggcaaaagcgcaggatttttactgctgggaatcacctgcggcatgggggtgatgaccaaaggttttctcgcccttgccgtgccggtattaagcgtgctgccatgggtagcgacgcaaaaacgctggaaagatctctttatttacggctggctggcggtcatcagttgcgtactgacggttctcccctggggactgacgatagcgcagcgggagcctgacttctggcactattttttctgggttgagcatattcaacgctttgcactggatgatgcccaacatagagctccgttctggtactacgtgccggtcatcattgccggtagtctgccgtggctgggattactccccggtgcactatacacaggctggaaaaaccgcaagcattccgcaaccgtctatttgttgagctggacgataatgccgctgctgtttttctccgttgctaagggtaaattgcccacctatattctttcctgctttgcacctttggcaatgctgatggcgcattacgctttgctggcagcaaaaaataatcctctggcgctgcggattaatggctggattaacatcgcttttggcgtcactggcattattgccacatttgtggtctccccctggggaccaatgaacacgccggtgtggcaaaccttcgagagctataaagtcttttgtgcctggtcgattttttcgctatgggcatttttcggctggtacaccttaacaaacgtcgaaaagacctggtcttttgccgcgctttgcccgctggggctggcgttgctggtaggattttcaattcctgacagagtcatggaaggaaaacatccgcaattttttgtcgagatgacacaagaatcacttcagccaagccgctatattcttactgatagcgtcggtgttgccgcaggtctggcatggagtctgcaacgcgatgacatcatcatgtatcgccagacaggtgagttgaaatacggccttaattatccggatgcgaaagggagatttgtcagcggtgatgagttcgcaaactggcttaatcaacatcgtcaggaggggattattacactcgtgctttcggttgaccgcgatgaagatatcaacagtctcgccattccgcccgcagatgccatcgatcgtcaggagcgtctggtgctgattcagtatcgtcccaaatgatctggctaacattagtctttgccagcttgcttagcgttgccgggcagttgtgtcagaaacaggcaacctgctttgtggcgataagcaaacggcgcaaacatatcgtgctgtggctgggactggcgctggcttgtcttggtcttgccatggtgctctggctgctggtcttgcagaacgtaccggtaggtattgcctacccgatgttaagtctgaattttgtctgggtgacgctggctgcagtaaaactgtggcacgaaccggtatcgccgcgtcactggtgtggggtggcgttcattattggtggcattgtgatcctcgggagtacggtgtaatgggcctgatatggggattattcagcgtcattattgcctcagttgcgcaattaagcctgggttttgcggcgagtcatctgccgccgatgacgcacttatgggattttatcgcggcgctgttagcttttgggctggatgcccggatactgttactcgggctgctgggttatctgctttccgttttttgttggtataaaacactacataaacttgcgctaagcaaagcctatgccttgctcagtatgagttatgtgctggtatggattgcttcaatggtacttcccggctgggaagggactttttcgctgaaagcactactgggagtagcctgtattatgagcgggttgatgctgattttcctgcccacgacaaaacaacgttactgagttttccctgccactttacactgccgttcccactcatcggggctataacagcttgcagagaggactttcaccgtatgcagcttttcacgattaatacaataaagcgcattctgcaaaggcgagagtaaatcccccactttcacggcgaagtcactcttcacttcggcgatcatttttatcgcgccgccagcatcgcagagcataagtacatgtctgttatcttgtttattgcagcacgattttttgaccagccattccattatattatcctgtttgctaagagttttcatatcaatttacagattaacagataaactctttatcaacggcaatggaatggcagaactgagaagtgaaacggagggttaattattgctgacgttgcacccactcttttagcgcctgacgtgaaattttaataccgccgtttttcagctccggcggcaaagtcagccaacgtaccggttgctgaaaacgggccagcttatctttcacccattcactaagatcaacgctctcgtggtcatactccatcaccgccaccggtcgatgaccaaactccttgtcggcaacggggacgataaacacctgcaaaaccgcaggatgtgcagcaattacgcgctcgacttcttccggctgaataccctctccgccactgaagaatagattgtctaaacgtccgacaatggtcagcttgccattatgcatctcaccgcgatcncgcgtagcgtaccagccttcgtcattaaccagtgaaaccagttgcccgttacgccagtaaccttctgccatactggcagcccgcagccacacttcattattaacgattttcacttcccgacccggcagcggcgaaccaacgtctgccaggccgtcggcttctttcgcacacaccgtggaggcaaactcggtcagaccatagccgcaaaagcaacgaatcccctgctcgcgcgcctgttccgtcaactcgaccgggatagccgcgccgccaagtaacaccgctttcagggaaacggaactgcggttaaccagcaaacgccagagttgtgttggcaccagtgaagcgtgagtacagcctgccagcatttgctccaatggctgtttatcacgcaccgtcatccgcgcaccagcgtataaccagcgccacataattccctgaccggagacgtgaaacagcggtaaagagagcaaccagtcatcgtgatcgccaaacggaatcagcgataacaccccttcggcactggcaagatgggcctgataagtatggacagcggctttcggcaacccggtagaacccgaggtcaacgtcattgagcacagacgcgtcggctgccacgtagcgacatgtgcgccttcaacccgctgaatgtgcagcgacgttaatgccggaaacgtgttttccccatccggcaccagcgcaaattgcagcgtcagattgggcagcaattcttcaagcaacggttgcggcagctgagggttcacgggcaacacccgcgccccgcattgcagtaacgccagccaggcgagcagcgtttgcggcgtattccacgcccgcaacatcacgccgctgccctcaaccacaccctgcaccgcaaatccggaggctaattcatcgacgcgagcacaaagctcgcgccagttgagttgctcgtcattaagacgtaaggcgatggcttctccccgcacttgccgccagtgacgccanggccagtcagagaagatcataacaaccgctccagtgcatcaacttccacgacaggcagcgtgctacccggccagcgacgtacctgctgcgcctgcattagatccagcgtgtccagccctggaatggtgtccggcgttaaccaggcagcaatccgcgccagttgcgttaagcctaagctcgattcaatggaagaactgatcactgccgtcagccccagcgcgtgcgccgcctgtacctgctcgcgaactttctccagactgcccgtgagcgtgggtttgataactaccgcgcgcacgccctcttcagccacaaaggcaaaatccggctcgcgcaagctttcatcccaggcaatggcaatgccggtttcacgggcaaacgctcgcgaatcatcgcgggttttgcacggctcttcgagaaacgcgatgcggtggcgataatccgggttaacgtatttggcaaactgctgacctttcagcggtgtccaggcgcgatttgcgtcaagacgcaaatgcagatccggaattgcctccagcaacagattcaccaccatgccgtcgcgcaccgcttcgtacaatcccactttgaccttcgccactttctcgcctggcatatctgcaagtttgaggatcagatcgtccggatcgccattacacagtggtgccgtacggtaattggccgcctgcgggagcgtatctgccagctccgccaatgcacaacttacgccaaaggcaacggaaggcatctgcggtaattcgcaatcgcctgccagccagttatttacccaggcaagcagcacactttgcgcctcttcccaggtttcctgactgaagcccggcagtggggagatctccccccacccttcgcgctcgccctcacgcaggcaaacgtacagcccgtcgcgggtttttaaccgcctgtcgcgcagaaccacccccgcgtccatggggatntgccagcggtatacctgcgcgctacgcattacggattccgtttgaatttgctgaagtcaggctgacgtttctggttgaaggcgttgcgaccttcctgaccttcttccgtcatgtagaacagcatggtggcgttgcccgccagctcctgcagacctgcctgaccgtcacagtcggcgttcagtgcagctttcaggcagcgcagcgccatcggactgttttgcagcatttcacggcaccagcgaacggtttctttttccagatccgccagcggtaccacggtgttgacaaggcccatatccagcgcctgttttgcgtcgtactgacggcacaggaaccagatttcacgcgcttttttctgcccgacgatacgagccatgtaggaagcgccccagccgccgtcgaaggaaccgactttcgggccagtctgaccgaagatggcattatctgccgcgatagtcaggtcgcacatcatgtgcagaacgtgaccaccgccgatggaatagccagccaccatcgcgacaaccggtttcggacaggtacggatctgacgctggaagtccagcacgttcaggtgatgtacgccggaatcatctttatagccgccgtaatcaccacgcactttctggtcaccaccggagcagaacgctttatcgcctgcgccagtcagaatgatcacgccgacgttatcgtcataacgcgcatntgccagtgcctggatcatctcttttaccgtcagaggacggaaggcattgcgcacctgcggacgattaatggtgatttttgcgataccgtcggtggatttttcataacgaatgtcctcaaagccttcggagcagtngtgccattcaaccggtgcgtaaagcattgcttcatcaggataaatcatattgtgtcctttagtcagaaacgcaagatctgcgccagacttgcgattacgccagcgggattttcccgatgcgcgttatgtccggcgcgaggaatgacatggcagtcggcagccagttccgccgccagggcgcggaatttgctgtcacgttcaccacataaataataaaacgcaaatgtgcgggcgctaaggttagcacgtaaatcaggctggacggcgagagaagtcgcctccagcatggcnnnnagggttgcgccattattgttgctgcgcagcaccaccagctcccggcgttgatcgtcattgagcgaggcaaaaacaggctgttgataccagtcggcaaataccgcggttaatggttcggaacgaaaacgctgcgcccattggcgatcggaacgctgacgttccgcgcgttgttcagcattttgcagccccggatgaccgccttcgacaacaaccccacaaagccccgccagcccctggcaagcggccatcatcgccacccgtccgccaagcgagtaccccaccagccagaagctaaggatgttgtaactaaccagggttttacgcagtaagtcggtgacatcatcaaatccatcgacgctaatcgccgccgaaccaccgtgacctgggagatcaacatacaaccgtgagtagtcggcaaacgcctcgccgacttcctgccattcgaggcaatcgccggaaaaaccgtgcaaaaacaccagccagggtaaacctggtttgccgtgttttgcctgcgcgtgcaggatcataaatggcttacctgcgccagcagctgctggagcgtttgcgcgccgtcggtgtcgttaaccaccatttcaattaccgtggtggtcggagtacgccaggcgtcggcaagtaccgtttcaagttcctgccagttttgnggacgatgatatttcagctcaaacatcgcggcagcgtgctcaaaatggacgttttgcggcatcagatagaaacgctcgcgctcgcttttcggcgttggcagcagcgagaaaatttgcccgccgttgttgttcaccacaattaataccagcggcgcggaaacctggcgcaataacgccagcgcattcaggtcgtaaagtgcggagagatcgcccacaatcgccagcgtcggtttgccgcttgcccgctgaacgccggcggcagtcgagagcagcccgtcgataccgctggccccacggttgctgtacaccgggtaacctgccggaagttgcgaaagcgcatcaatcagacgtaccaccaggctgttaccgacaaacaattgcccctgttcaggcagatantcgctgatgcgatgcgccagttgcgcttcgccaaacgcatcncgacaggcaataaccgcctgcattgcctgttccgccaggcgcgggatttcaacgcaccanggctggcgtttttctgccggatgcagttccagccagtcggcaatattggcaattaagcggcgtccacgatggtgtgccggatcaagccgcccttcgatgtcatccacaatccagtactcttcgggttcacagcttgcctgccattgcaggagccgtttgcccgtcaggntgnttcccagttgcaccacaatttgcgcctgttgcagttcgctggtcgctttggcattgcctaaccagagatcggcacacggcagcggctgtccggtttgcgacagcacgtcgccaatcagcggccagccaagagtttgcgcccacagggcaacttttttgccctcttccgcactcatgcgcccggcaaccaccacgccgcgcttttgccgccagaagaaccagtcgcgctgtttttcgctctcaagacgaggcgcttcacgcagccacggcttatcatcctgccaccagtcacccagacgctgttgccagctaagcccagtgtcgtccatctcgccatacagcggttcagcaaacgggcagttgatatggaccccaccagcatgaagcgtaccgagagcatggtcgatggtagaaaccagccaacgtgcggggatatcctgggtcgggcgcggcagtgaaatactgtgcgtggggtgagaggcgaacattcccggctgacgaatcgcctgattcgcgccgcagtcaattagctccggcgggcgatcggcggttaacaggatcagtttttctccggttaacccagcttcaatcagtgccggatagagatttgctaccgccgtgccggaggtcacaatcaccgccaccggctgcttgctgactttcgccagccccagcgccagatgccccagtccacgctcatcgaaatgggtgtggtgaatgaatgcggaattctccgccgccgctaacgttaacggtgtagaacgcgagccaggggcgatgcagatgtgtcttacgccgtgacgcgttaatgcttccagaatgaccgccgcccagcgtcggttaaatgcgcttactgacatgagtttgtccggtatcaatattgcggctaagtataaggagctacaaaaatagattattgatatgaatcggtaatgatgcgactcattactattccatttgtaataaagtacgcagccctgccgctttgttgtcgatttcctgccactcttgctcggggtcggaaccacggacaatgcccgcgccagcatatagccgcacgacattgccgctgatttttgctgagcgcagggaaacgcagaattcgctttgttgtaatgagagatagcccgcanaaccggcgtaccattctcgggtgaacggttcgtgatgggcgataaactgtcgcgcnagatcgcgcggtaagccagcaactgctgccgttggctgcaactgatgtaaacagatcacatcatccgctttgttgagtgaagtccagatacagcggcgaagatgctgcactttacgcagacgcagtacctgcggcggtaaaacatccagcgtctgggtatcggcctgtaatcgttggcagatatcttccaccaccagcatgttctcgcgctggtttttatcatccgccatcagccactctcctaactgctgcgcctgcttatcatcaggatgatttgctactgttcccgccagcgcttcagtacgcagcgctttgtcacgccgccgccataaccgttccggtgaagagccaagaaaagcattttcgccatcaaaggccatgtaaaaatggtagcaattgagattcagtcgacgactggcagccatcatcgccgccgcattgaccggacttgcgaaatgcaggtcagttgcccgagcaagcaccactttgtcgagctcaccttcggcgatggttttcgttgccagttcgattaattgcgtccagcccgttttgtccggccagtgttgttctcgcgtagtggttaaatgtaacccaggcaagggcttgatactcaccagtgtggcgataaattctcttgccttaatcgcatcgtgctgaagggagctttcgctgaatagcgtcagccgcagcgtggctttaccgccacagcgtcgccattccaggcgtggtaaaagtaaattgccctgcgacgggtcaaacgcattcagcccccaaatgcgtaagtcggcgtgttccgggtgctggcgaagaaaacgttgtgcctggtccaacgacgtaaaacgggtaatcgcgcccaggacggcagcttcttcatcaccattacgttgttgccagtagaattgcgggtacgtttgctgactggccagccagctcaaggcatcaaaagcgtctttgagagggaaaggaatatcgataacccgaatgccgggtgtcgccggaatntcttgcgacaaatggcgcagtagattttccagcgccgtagtaagtgattgcacgcggacctctccctgttaaaagcctcacattatacggggtactacaaaaaaaatgcagtaccccggtgtagggaggttttaacggcgtgccagcaacagtcctagtaccagcccaacggccgcacccacaccaattccctgccagggtttttcgtggacgtagtcatcagcacgataaacagcctgcttcgcccgatagtaataactgtctgaagcctggctaacccgttttttcacatcatccagcgctttttctgcacgcgctttcagctcaacatatttctgatcggcgggatcgccagaggagcggagcacctcttccagtgtttcactaagcagcgtcaggtcgtcatcgatacgtgtatcaccaaactgattagacattctcgttctccatttgcgtaaaacctgtcactaactatagacaagggttattgattacgcctgaattacctcgcgtgccatcccaatgtgtgggataccatcttcttcatagatctccgtcacagggataaaaccgaaactctggtagaagttttgcagatgcgcctgcgccccgaggtagacaggcttatcaggccagtgatgcgtgcaagtgtcgagggttttactcatcagttgctgccccactttttcgccacgcaacgcttcactgacaatcacccgaccaataacgaccggctcaagatcatcatcacttttcagaatcctcgcatatgccaccagttcatcatttttccaaccgagaatatggcgattatcccccgtcaaatcatcaccatcgatatcctgataagggcaattttgctcgacaacaaacaccgcgcaacgcagttgtaataaggcataaagctgggaaaccgataattcagagtgatgcagatcttgccattcaatcataatgctctccttttagatgtatgccttatactagccggaatattttttgaaacgtgatgaactcatggaattaatttttttaggtacttcggccggtgtgccaacccgcacgcgcaatgtcacggcaatattgctaaacctgcaacatccgacccagagcggactttggttgtttgactgcggtgaaggcacccagcatcagctactgcataccgcctttaaccctggaaaactggacaagatttttatcagtcaccttcatggcgatcatctttttggtttacccggcttgctgtgcagtcgttctatgtcaggcattatccaacccttaacgatttatggtccgcaaggtatccgtgaatttgtggagaccgcgctgcggattagcggctcatggaccgattatccgctggaaattgtcgaaattggcgctggcgaaattctcgatgatggcctgcgcaaagtgaccgcttatccaatggaacacccactggaatgctatggctatcgtattgaagaacatgataaaccgggtgcattaaatgcccnnnnnnnnaaagctgctggcgtaccgcctggcccactgtttcaggaattaaaagcgggcaaaacaatcatgctggaagatggaaggcagattaacggcgcagattacttagctgctccagtgccaggtaaagcgctcgctattttcggcgataccggcccctgcgatgccgcacttgacctggctaaaggtgtcgatgtcatggtgcacgaagcgacgctggatataaccatggaagccaaagccaatagtcgcggtcatagctctacacgccaggctgcgacactggcccgtgaggctggagtcggtaagctaatcattacccacgtcagctcgcgctatgatgacaaaggttgtcagcacctgttacgtgaatgcaggtcaattttcccggcgactgaactagcgaatgatttcaccgtgtttaacgtttaactctgcttattattaaaaacagggcgaaacttgccctgttatcgcaacccgcgctacatatatccactcacacgggcatattgagcgatttttgatatttattcatctccttacgcactatattcagagcaataagttgcctctttttatcttcattcagcacaacctttgcaantaaaaggagcatatgatggttacagttgtcagcaattattgtcaattatctcaaacccaactcagtcagacatttgcagaaaaatttactgtgaccgaggaattactgcagtctttaaaaaaaacagcgttatccggagatgaagaaagcattgagttactgcataatattgcgttaggttatgatgaatttgggaaaaaagctgaagatattctttaccatattgttagaaacccaacaaatgataccctatcgattatcaagcttataaaaaatgcctgtttaaaattatataatttggcacataccgcaaccaaacaccccctcaaatcacatgattcagataatctcctgttcaaaaaactattctccccttcgaaattaatgacaattatcggtgaggacattcctctcatatcagaaaaacagtcactttcaaaggtacttttaaatgataagaataatgaactgagcgatgggacaaacttctgggataaaaatcgtcaattaaccacagatgaaatagcttgctatcttaaaaagatcgccgccaatgcaaaaaatactcaagtcaattatcctactgatttctacctccccaattccaacagcacttacctggaagtcgctctcaatgataatattaagagcgatccatcatagccgaaagaagtccagttattccccataaatactggcggacactggatattagtttcgctacagaaaatagttaatgaaaaaaacaacacacaacaaataaaatgcatcatattcaattcattacgtgcactaggccatgaaaaagaaaattcacttaagcgtatcattaacagtttcaattgtttcaattgtgaccccacgagagaaacgccgaataataagaatataacagatcatttaactgaaccagagataatatttttacatgccgatcttcagcaatacttaagccaaagttgcggtgcatttgtgtgcatggcagcccaggaagtgattgaacaaatggaaagcaattctgacagcgccccctatacgttattaaaaaactatgctgacagatttaaaaaatattcagcagaagagcagtacgaaattgattttcaacatcgtctggaaaacagaaattgttatttagataaatatggcgatgcaaatatcaatcattattatagaaacttagaaataaaaaactcacaacccaaaaatagagcatcaagcaaaagagtaagttaacatcattgttaattaattcgaccagtcagcaaatatgctgactggtcgaacatagtttgctaaaaagtcatcactgactgatgtcagtcacaccacccgccagttcaatcttcgggtatttccagcgtatctcggcacgcgattgctggtctgttgatgtagtggattgttgttgctgacttttcttaccctcagatttctgccccctgtcaactcaatctgccaataaataacataattatatttttccttatatgaattcctttttaaaatagcgaagccactgtaaaagatactttttgtatagatctaacaaccgtaataaaacaaacactcataactcattataaataatgataaaataacgtcttttattgataatttacatatgaaaaaaattttccttttgttatattatttctgttttcactccctctgattattttttaccaaccctgggtcactgcattatcgccaacgccccgacacgtaattcctgagcaattagaaaaaacagttcgttatcttacacaaactgtgcatccacgtaatgccgacaatattgataatctgaataggtccatagagtatataaaaaaaggtctttgtcagtagcggtgccagagttaccgcgcagggcgtccccaattggctattacgactctgcgcctggtagccaggattacccttacccgcaatgtcctggctttatcccgatcggggggactttattgcctggtcggcagaatacaggatatcaacgccgttcgtcaggtaaaaacggcattgttatcatcccgggatttatctgtttattctatgaatgccccatggtttattcacggtattgatttctctgaccaccttaattattggcaacacgatattctcgccgtaatgattactgacaccgctttttatcgtaataaacaataccacttgcccggtgatacagcagacagattgaattatcagaaaatggctcagatggtggatggtgttataactttgttacacaacagtaaataataaaaatttctcgaggcgggtccagaaacagcgacatgtacattttattttccctcgtctgttttnagatgcgaaacataaaattcaatggaggaaaaataaatgggaatgattggttattttgcagaaattgactcagaaaagattaaccaactgcttgagtctactgaaaaacctttgatggataatatacatgacacgctttcaggattacgccgactggatattgataaacgctgggattttttacactttgggctgacaggcacctctgcgttcgatccagcgaagaatgatccgctgagtcgtgccgtgcttggtgaacacagcctcgaagatggtatagatggtttcctgggattgacatggaatcaggagttagccgcgacaatcgaccgactggaatcactggatcgaagtgagctgcgtaaaaagttttccattaagcgactcaatgaaatggagatttatccgggagtgaccttttcagaagagttagaggggcaactctttgcttcgatcatgcttgatatggaaaagctgattagcgcgtatcgacgtatgctgcgacaagggaatcatgcgctgacggttattgttgggtgatggtgtcagggcaccaaaaaaaaccgccgaacatgtcggcggctttctgacttacaaactgatagcttacatcagcggcattgctaaccgcacaatactaatcagcggttgtggccatacacccagcaccagtaccaacagtgcagaaatcagcaccangataccgcccgcgctgtactgccagtttgacggtgcatcgcgacccggttgttccggtgcgtgcaggtacaggctcaccgccacgcgcaggtagtagtagaggccgattgccgaaccgacaaccacggcacccaccagccaccacaggtgtgcctggacaccaaccgccagcacgtagaacttaccgataaagcccagcgtcatcgggataccggccagagacagcatcatcaccgtcatcaccgccgcgaggatcggacgatgccagaacagaccgcggtaagagaacagggaatcagcatccgggccacgatacgggctggacatcaggctgaccacgccgaacgcgccgaggntgctgaacagataaccggccaggtaaacccctaccgcttccatcgacatctcgccagtttgcagcgcaatcagcgccaccagcagatagccgaggtgagagatagatgagtaaccgagcagacgtttgatattggtctggctcagcgccatcaggttaccgaagatgatggaggcaaaggcgataatcgccagcaccacccgaatcgcttcgctgtcacccaccggtgcgtagaggaacagacgcatcaccacaccgaagatagcgattttgctcgccgtcgccaggaaagtggaaaccggcgcaggcgcgccctggtatacgtctggcgtccacaggtggaacggcaccagagagagtttgaagccgaggccaacaatcatcaggccgaaacctgccagcaacagcggctcgtttagcataccgtcgccgaggtttttacccagcgcgacaaacgacaggtcgccagactgcgcatacaccagcgccataccgaacagcaggaaagaagacgctgcggcagaaaggatggtgtatttgatactggcttccagcgaacgtttctggcggaaagcgtaaccgaccaggccaaacagcggcaaagagatcagttcaataccgaggaacagagacgccagatggtttgcattcgccagcaggatcccgcccagcgcggcaattaacaccaacaggtagaactcatccttgttgtcgttatagccttcaagccacgggtaggcgaaagtacaggtggcgaggctcgccaacaataccagcccggtgtaaagcatggcgaaaccatcaacgcgcatcagcggcgtaacgtccatagcgcccgcctggccaacaaaccagagcgaaaccagcgccgcgttaagcccaataaccgagagcgtagcgttgaggaaatgattgcgtcgccacgcaatggagagcatcacaaccaccaccgtcaagccgacgatcagcaacggtagcagtgcgatcaggttttgtggagttattgtcatggcgatttacggccttgtagtagtaacggaattaacaaaccactgctggatattgccaatcgcggagtgcgaggtatccagaatcggctgcggatagaagcccagcagtaccagcagcaccaccagcaacaggatcataaacagctcacgcagcgacatccctggcagttcctggctggcaatctggcttttcgctttaccgaagtaagcgcgatgtaacatcgccagcgaataaacagatgcaaagaccagcccaaaggtagagataacggtaatcaccgggacaacctggaagctgccgaacagaatcataaattcgccgacgaagttaccggtgcctggcatcccgagcgttgccaccgcaaagaacagtgacaaggctggcagccatttcatcttgctccacagaccgcccatcatgcgcatgtcgcgggtatggatacgttcataaagctgaccacaaagaataaacagacccgccgctgacaagccgtgcgcaatcatctggattaccgcgccctggtaggccaactggctgccggtgtagatagcaatcagtacgaagcccatgtgggaaaccgaggtgtaggcgatcagacgtttgatatcggtctgggcgaaggccatccacgcaccgtagaagatgccgataacacccagccacatggcgattggcgcgaactctgccgacgcgtttgggaacagcggtagggagaaacgcagcagaccgtaagcggcggttttcagcaagatccccgcgaggtccacggaaccggcggtcggtgcctgtgagtgcgcatccggcagccaaccatgcagcggaaccaccggcattttcaccgcaaacgcgatgaagaagcccagcatcaacagatattccacaccactggacattggcgtattcagcagctcttcatagttgaaggtccagacgccggtcgcattgtagtgaacaaaaaccagcgccaggatggcgatcaacatcaccagaccactcgcctgggtgtaaatgaagaacttggttgccgccgtgatacgcgttttaccatcagaggctttatgcccccacagtgcgatcaggaagtacatcggcaccagcatcatttcccagaagaagaagaacaggaacatgtcgatggcaaggaacacgccgataacgccncccaggatccacatcaggttgaggtggaagaagccctgatatttttcgatctctttccacgaacagagtaccgccagcacaccgagcagaccggtcagcacgaccatcagcagcgacagcccgtcaatggcgagatggatagagataccaaaacgcgggatccacggcatgtcgaattcagactgccactgcggaattccggcggattgcgtcagtgaataaccgccctgcaaccacagttgcagcgacagcgccagcgtcaatcccatggtgatcagcgcgatccagcgcggcaccttgacgccaaagcgttcggtctgccagcacaggaagccgccgataaaggggattagtattaaccagggtaataacatagctaagtatgtcccttatatttactcctgctcaggctatctcactcgtcagcccgaatcccggcagtgctcgcaatcctcacgtacttaagtacgctccggttgctgtgcgctggcggtatccggtctgacttcgccgatgacgcctgtacttcaggaacagttacctaaaatttattcttagttcacagacccggcgcaacgccgggtatattcactcagccaacaactcaacgcagtaccatcaacagtgccagcaccacgaccgcaccgatgctcatggatgccacataccagcgcagataaccgttctcgcttaacagcaggcctttacctgcaaagcgggaaaggacagccgggatgttcatcattgagttcagcggatcgcgtttcagcaaccaggcaatgcccaggaacggcttgacgaacactttgtcgtacagccagtcaaagccccaggcgttgtaccaccaggtgcccagcagacggcccggcgcactgttggcgatggaggtcaccagagtacgtttacccagccacagccaggctgccagcagaatgccgaccaccgcgaccacgccagaggtaatttccagggtcaacatgctgccgtgcgccagttccgtcgtttgcggaagcacgccctgcagcggcggtacaatcagtgcgccaacgaaggtggaaaggatcagcagcacaatcagcggcaggctgtgagttacccctttcacggcgtgagcgtgaatttgttcttttccgtggaagacgatgaaaatcatacggaaggtgtagagcgaggtcataaacgcaccgaccagacctgccaccatcagattgatatgaccattcgccatcgcacccgcgaggatctcatccttactgaagaagcccgcagtgactagcggcagtgccgacagtgctgcgccgcccaccaggaagcagagataaaccagcggaatagatttacgcagaccgcccatcttgaagatgttctgttcgtgatggcaggcgagaatgacggaaccggatgccaggaacagcagcgctttaaagaacgcgtgggtcatcaagtgaaaaatcgccgcatcccatgcctgcacgccaagcgcgaggaacatgtagccaatctggctcatggtagagtaagcgagaacacgtttgatgtcggtctgtaccagcgcggcaaaaccggccagcagcagcgtaaccgccccaacaatgcccaccagatgcagaacttccggcgtcatcaggaacaggccgtgggtacgggcgatcaggtagacacccgcggttaccatcgttgcggcgtggatcagcgcggagacaggcgtcgggcccgccatcgcgtcggcaagccatgtctgcaacggcaactgcgcagatttaccgaccgcaccgcccagcagcatcagcgtcgcccacatcagcatgttattgccgtcagcaaagtgcgctggtgccagttccaccatttcgcggaagttcagggtgcccagttcgttgtaaagaatgaacagcgcgaaagcgaggaacacgtcacccacacgggtcacgacgaacgctttcattgccgctgcgccattcttcggatcggtgtaatagaacccgatcagcagataggagcacaggcccacgccttcccagccgaggtacatcagcagcaggttgtcggcaagcaccagaaccaccatgctggcgataaacaggttggtgtaagcgaagaagcgagagtagccctcttcaccgcgcatataccaggaggcgtacatgtgaataaggaaacccacaccagtgaccaccgagagcatggtcagcgacaggccgtccagcaccaggttaaaaccgatgttaaagtcgcctaccgacatccacgtccacagcggctggctgtatgcctgctcgccgttagcgaagaagtcaacgccaataaaggcagttaccagcgccgccaggcccacagagccaacgccgacgatcgccgagacgttttcagaccagcgcccacgggagaacgccagcaggacgaagccaatcaatggcaaaataatggttaaggcaagcatgttcatccgcgcatctcacttactgaatcgatgttcaggttctggcgacgacggtgaagttgcagcagcagcgcaaggccgatactcgcttctgccgccgcgaggctgatggcgagaatgtacatcacctgaccgtcggtctggccccagtaacttccggcgaccacaaaggccagcgcggaagcgttaatcatgatttccagaccaatcagcataaacagcagattgcgacggataaccagaccggttaagccaagaacgaataagattgccgcgaggatcagtccatgttgtaaggggatcatgcgtgctcctccgtttttcttttcgcgctgccgtctttacgattgctcagcacttcacccgcacgctcttcacgaccgacgtggaaggccacaaccagacccgcgagcagcagcatagaagccagttccaccgccagtacgtaaggcccgaacagcgtaatacccactgctttagcactgattggcgtaccgtcgataccttgatcgttaacaccgagaatggcgtaaacaatcaccaccaacatgatggctgacaaaattgccggaccaatccacacctgcggtttcagccactggcgttcttgttcgatttctgaaccgcccaggttgagcatcatcaccacgaacacgaacagcaccataatggcacccgcgtagacgataatttccagcgcaccggcgaagtaagcgcctagtgagaagaacaccccggaaatcgccagcagcgaaataatcaggtacagcagtgcgtgtaccggattggtatgggtgatcactcgcaaggtcgcaagtatggctatcaggccacagatataaaaagcgaactccattgcccctctccttacggtaacaggctcttgacgtcgataggcttggcttcgttctctgcttcgcccttatctttgccgtcgattgccatacctgccatccggtagaagttatactccgggtatttgcccggaccggagatcagcagatcctctttctcgtaaaccagatcctggcgcttgtattcccccatttcgaaatccggggttaactgaatcgccgtggtcggacaggcttcttcgcacaaaccacagaaaatgcagcgtgagaagttgatgcggaaaaattccggataccagcgaccgtctttggtttctgctttttgcagcgagatacagccgaccgggcaggctaccgcgcagaggttacaggctacgcaacgctcttcgccgtccgggtcgcgggtcagaacgatacgaccacgataacggggcggcagatagaccggctcttccgggtacattcgcgtttcgcgtttggcgaacgcgtgcaggccgatcatccagatactacgaacctgggtgccgaaacctactaacaattcttttaaggtcatggtcttattgccccttattgcgcctgccagagaatgacagccgccgttaccagcaagttgatcagcgtcagcggcaggcagattttccagccgaaggacattacctggtcataacgcggacgcggtaacgacgcacgaatcaaaatgaacatcatcataaagaacgcggttttcagcgcgaaccagatgaatggcggtaacaacgggccttgccagccaccgaagaacagcgtcaccatcaatgcagagatggtcacaatcccgatgtactcacccacgaagaacagaccgaacttcataccggaatattcaatgtggtaaccatccgccagttcctgctcggcttccggctggtcaaacgggtgacggtgacacaccgccacgcccgcgatggcaaaggtaataaaaccaaagaattgcgggatgacgttccacacatgcgcctggctgttgacgatgtcggtcatgttgaatgaaccggcctgcgccaccacgcccatcagggaaagcccgaggaacacttcgtagctcagggtctgcgcagaagcacgcatcgcaccgagcagcgagtatttgttgttacttgaccagcccgcaaacagcaccgcgtaaaccgccagaccggccatcatcaggaagaacaaaatcccgatgttcaggtcggcaaccacccaacccggactgactggcacaatcgcaaaggccagcagcagcgaggtaaaggcaatcatcggtgccagggtaaagatgacgcgatccgagaatttcgggatccagtcttctttaaagaacattttgatcatgtccgcaaccagctggagcgaaccaccccagccaacacggttaggtccgtaacggttctggaacagacccagcaggcgacgttcgccaaagctcatgaatgccccgcaggtgacaaccaccagcaggatcaccaccgctttgaggatggtcagcaggatctcaatcagttccggtgatatccaactcattgttgtgcctccttgagatcctcaagatgcgcgccagccagcaccggagcaatgccggacatacccatcggcaagcccacctgccctgccgtcagcccttcagcgatttcaaccggcagagtgaccgtgttgccatcgtaactaaaggagacgcgtgtacctgcgtttacacccaacttcgcggcatccgctgggttgagtttgatgtacggctgcggcatacgacactggaagaccggagcacgctgtgacaattcatcgctgccaaacaggtggtagtacggcgcgatacgccatttcccgtcctgcggctggaagcgtgccggtacgctggtgaagtaatccagaccattttcgctggtttcaaacagacgcacacccggatcgccaaagcgcagtttgccgcccacttcgtcctggaatttgttccacgcctgcggggagttccagcccggagcccaggcaaacggcacttgcgaacggtgcgcggtcggctggttgttaccttccatcgagaaggtgaacatggtgtcaatatcctgcggctgacgcggctcatgaacgctgatattggcgcgcatggcggtacgaccgctgtaacggtgcggttcacgggccagtttctgcccacgaatacggaatgtcgcatctggcgcagcatctttgatacccgccagttccgggattttcgccacaacagcgtcaattacatggtcgagctgcgtccagtccacttcacggctcagcaaggtgctgtgcagcgagtgcagccagcgccaactttccagcatgacagttttgctgtcgtaataagccggatcgtaaacctggaagaaacgttgggcgcgaccttcattattaattaccgtaccgtcgctttcagcaaagctggcagcggaaagcaccagatgggcgttttccatgatcgctgtgcgttgatggtcaaccaccatcaccagcggcgctttagccagcgcagcattcacgcgggtagcagaagcgtgacgatgcagatcgttttccagcaccaccaccgcgtcggcgcgtccggtttccagttcggttaacgcttcttcaagcgatccaccgcccataatgcccagccccatgctgttgacggaacgggcaatcatggtgataccgacgtcagcgccgcgacctttcagggctttcgcgacgttagccgcagcctgaatcacctctaagctaccggcgttcgtcccggagataatcaacggtttcttcgcacccgccagtgcctgcacgatgacgtcgattttgctttgcagctcaggttcaataccgtcaaccgctggcgcagagttatccagcgcatgggcgatggcaaaacctaaacgcgcctgatcttcaaccggtgcgcggtaagtccacgccgcgatatcatccagacgggtgtcatcaacgttggtaacaaacagcggatgcttagcacgttgaccgatattgaggattgccgcaatctgccagtcagccactttctgtgctgccgccatttcgcgcgctttacctttcaccgcctggcgcactgccagcncgannngcgcgccggtctgggtaacgtcttcgcccagcaccagtaccgcatcgtaagattcgatttcgcgcagagccggagtataaatgccgccttcacgcagcactttcagcgccagttgcagacgttcctgctcaccgtgagcgataccggtgtagaagttttcttcgcccaccagttcacgcagcgcaaagttgctttccacgctggcacgcggagaaccaataccgatcactttcttcgactgacgcagaatatctgccgcgccctgcattgcctgttcggcgttgagggtaatgaaatcatcgccacgacgctgtactggctgacgcggacgatctttcaggttgacgtaaccgtaaccgaaacgaccacggtcgcagaggaagtagtggtttaccgtaccgttgtaacggttttcgatacgacgcagttcgccataacgctcgccggggctgatgttacagccgatggaacattgctggcagatgctcggcgcaaactgcatatcccatttacggttgtaacgctcggagtgcgttttgtcggtaaatacgccggtcgggcaaatttcgaccaggttaccggaaaattcgctttccagcgtgccgtcttccgggcgaccgaagtagacgttgtcatgcgcgccataaacgcccagatctgtaccgtcagcgtaatctttgtagtaacgcacgcagcggtagcaggcgatgcagcggttcatttcgtgagagatgaacggccccaaatcctgattacggtgggtacgtttggtgaaacggtagcgacggaagctgtgtccggtcatcacggtcatatcctgaagatggcagttaccgccttcttcacataccggacagtcgtgcgggtggttggtcattaaccactcgaccacactttcacggaactgtttcgcttcttcgtcgtcaatggaaataaaggtgccatcggaagccggtgtcatacaggacatcaccaggcgaccacgcgtgtcttccgcgttttggtattgcttcaccgcacactggcggcaagcaccgacgcttcccagcgccggatgccagcaaaagtaaggaatatcaaggcccagagacagacaagcttccagcaggttgtccgctccgttgacctcgtattctttgccgtctacatgaattgtagccattagcatgcttccagttttctcagtcagagactgagcgttaatcgaaattcggttaccagcgctctttcagcaggttcggctgaatcccattaatcaaatgggtattgctgaacggctgtttgatccccgcctcaaattcttcgcggaaanatttgatggcgctctgtaacggctccactgcaccaggtgcgtgggcacagaaagttttacccgggcctaagaatcgacacagttgctcaagtgtttcgatatcgcccggctgaccttcgccacgctccagcgcacgcagaattttcacgctccacggcagaccgtcgcggcacggcgtacaccagccgcaggactcacgggcgaaaaactcttccaggttacgcaccagcgacaccatgttgatttcatggtcaaccgccatcgccagcgccgtacccagacggctgcccgctttaccgatactttcgaattccatcggcaggtcaaggtgcgcttcggtcaggaagtcggtgcccgcgccgcctggctgccaggctttgaatttcagaccgtcacgcataccaccggcgtaatcttcgaggatctcgcgtgcggtggtgncgaacggcagttcccacagtcccggatttttcacccgaccggagaagcccatcagcttggtgccagcatctttacttttcgagatgttctgataccactccacgccgttagcgaggatcgccggaacgttacacagggtttcgacgttgttgacacaggtcggtttgccccatacgccggaggttgccgggaaggggggtttcgagcgtgggttagcacgacgcccttccagggagttgattaacgctgtttcttccccgcagatgtagcgccctgccccggtatggacgaacagttcgaagtcgaaacctgttcccataatgtttttgccaagcaatcccgcttcagtcgcttcggcaatggcgcggmgcagatttactgccgcttcaatatattcgccacgcaggaagatgtagccacggtaagctttcagcgcaaacgcggagatgagcataccttccaccagcaggtgcggcagttgctccatcaacaggcggtctttataggtgcccggctccatttcatcggcgttacacagcaggtaacggatgttcatggattcgtctttcggcatcaggctccacttcaagccagtcgaaaagcccgcgccgccgcgccctttcagaccagcgtcttttacctgattaacgatttcgtccggagacagcccggtcagcgccttacgcgccccttcgtaaccgtttttgctgcggtattcgtccagccacactggctgtttgtcatcgcgcagacgccaggtcagcggatgcgtttcgggagtacggataatgtttttcatttataccgctccagcagttcagggatcgcttccggggtcagattcgcgtgagtgtcctcatcgatcatcatgtttggccctttatcacagttccccaggcagcaagttggcagcagcgtaaagcggccatcaaatgtcgtttgccctggtttgatgttcagctttttctcgagcgccgcctgaataccctgatanccnttgatatgacagaccacgctgtcgcaataacggatcacatggcggccaaccggctggcggaagatctggctgtagaacgttgccacgccttcgacgtcgcttgccggaatacccagcacatcggcgatcgcgtggatcgcaccatccggcacccagccacgctgcttctgaacgattttcagcgcttcaatggacgccgcacgcgggtcttcgtagtggtgcatctcgtgctcgatcgcttcacgctctgccgcactcagctcaaaagcctcggtttgtggttgttgattctcgtgcataattagcggtccacatctgacataacaaaatcgatactgcccagataaacaatcaggtcagacaccaggctgccgcggatcgccgccggaatttgctgcaaatgcgcataactcggcgtgcggatacgagtgcgataactcatggtgctaccgtcgctggtcaggtagtaactgttgatccctttggtcgcctcaatcatctggaaggattcattggcaggcatcaccgncccccacgacacttgcaggaagtgggtgatcagggtttcgatatgttgcagcgtgcgctctttcggcggcggcgtggtcagcgggtgatccgctttgaacgggccttccggcatgttgttgaggcactgctcaagaatgcgcagactctggcgcagctcttccactttaagcattacgcgggtgtagcagtcagaaacaccaccaccaaccgggatttcaaagtcgaagttttcatagccagaataaggacgcgccttacgcacgtcgaagtcgatcccggtagcacgcaggcccgcgccagtggtgccccactccagcgcctctttcgcgccataggcggcaacgccctgggaacgacctttcagaatggtattttgcagcgccgctttctcgtaagacgccagacgtttcggcatccagtcgaggaactcacgcagcaggcgatcccagccgnnnngcaggtcgtgcgctacgccgccaatacggaaccacgccgggtgcatacggaaacccgtgatcgcttccaccagatcgtaaattttctgacgatcggtaaaggcgaagaacacgggcgtcattgcgccgacgtcctgaataaaggtcgagatatacagcaggtggctgttgatgcggaacagttcggagagcattacgcgaatgacgttaacgcgagccggcacggtgatcccggccagtttctctaccgccagcacgtaaggcatttcgttaacgcagccgccgaggtattcgatacggtcggtatacggaatgtagctgtgccaggactggcgttcgcccattttctccgcaccacggtggtggtagccgatgtctggtacgcagtcgacaatctcttcgccgtcgagctgcaaaacgatacggaaagcaccgtgcgccgacgggtggttcggaccgaggttgaggaacatgaagtcctcgttttcggtgccgcgcttcatcccccactcttccggtttgaaggtcagggcttccatctccagatcctgtttggctttggtcagctcaaacggcgagaattcggtagcgcgcgccgggtaatctttacgcagcgggtgacctttccaggtttgcggcatcatgatgcggcgcaggttcgggtgaccgtcgaatgtaatgccaaacagatcccaggtttcacgctcataccagttagcgttcgggaacagtttggtgaaggtcggtacgtgcaggtcgttttctgccagcgccaccttcagcatgatgtcgcggttacgatcgatagaaatcagatggtagaaaacggaaaaatccgcggcaggtaacccttcgcggtgcgtgcgcagacgttcgtccatgccgtgtaagtcaaacagcatgacgtaaggtttcggcagtttctttaagaaatcgccaacttccagtaattgttcacgcttgatccacacaacgggaaccccggtgcgagtcgcctgaacagtaaaggcatccggcccaaaacggttgcgcagttcgccaattaccggatcatcaagatgatcgcgggtctgccaggcgggttcttgcgcggttaagtcggtcatattgttcaccattgcaaatggtccgtggtgactgtcggcgcagcaagcttcgcgaaatagatttaggaataagcgaagaaaaatccctttgccgacaggcgcaaattaaatctcgtcaggtgtacgcaggttggttacggcaatgcgttcaccgcgcttgcgttcgcgctctgattgcatattggcgcgataaacgccctgatcgccaaccacccaggagagcggacgacgttctttgccgatagattcctgcaacagcatcagtgcctgcatgtacgcttcaggacgcggcgggcagcccgggatatacacatcaaccgggatgaatttatcgacgccctgcacaacggaataaatatcgtacataccaccagagttggcacaggcacccattgagataacccattttggttccagcatctggtcatacagacgctgaataaccggtgccattttggtaaagcaggttcctgcaaccaccatcaggtcagcctgacgcggcgaagcacgcaatacttntgcgccaaaacgcgccacgtcatgcaccgcggtaaacgaagtcaccatctcaacgtaacagcaggaaagaccgaagttatacggccaaattgagtttttacgaccccagttaaccatgtcattgagcttgcccataaacacgtttttgttaacttcttgctccagagggtcggttacgatctcctgcttttgcagggggtaacggtcgttctcaccgttgggatctatgcgggtgagcgtataatccatcttaatgcctcgcggttagcgttgacgattagcgatactgttcgtttccgggttcatacgctcgcggcgtgaacgcgcgggcgtccagtccagcgcgccaatacgcaccagataaaccagacctgccagtaacacaaaaataaaaattgcagcttccacaaagcctacccagccgctttcgcggatagaggttgaccatgcgaacagatacagcgcttcaacgtcgaagataacgaagaacatggccaccanataaaacttggcggacaggcgtaagcgggcggagccgaccgagtcgataccggattcaaacggcacgtttttcgacctcgcgcgtgcgcgaccgcctaaaaaccaaccgcctaccagcatcaggcaacataggccaatggcaacgataagaaagatagcgaatgcccagtgatgagcgatgacttcagtggatgttgacatactcattgcttactcatcaaaagtagcgccagattcactgctcttcacggcagatggacgccacatcgattcatggggaggaataaaaaaaaccttacaatcactgtagaaattcttttatacagctaattgatgtggtcttttactcctttctataaccttttgtcaactttaacaaaagtttcttcacattagtttacataatatcaacaccattagcatttaatgccctttcaccccagatccttgacgactccaggataattagatgttgttgaatcgtgtccgttgtgaagcaatggaaaaaatacgggtctattttgacaggaatttgtgtcgattcctccccccaaaagagagtattttcttgatctgtgacacgcttttgtcattccataacaaaaacgcagcaacaaatttacgtattttttaacatcattgtagcaggtgatttttttcaggcgattatttgtgcgtacggggcgtgaatctctggtgattgaaaaatgaacagttttgtacgttctgcacgatgtgaagaangttctttactaaaaaaaagccgctggggtttaaaacacccccagcggctcgttttttacactattgtctcaggaattatctatcgtccgtcgattactcgatatccctttcaatcaacaatgaatcatccccttccggagcagatattgggctgtattgccacggattatggtagctctccatcgcctgatagatcacctgggccagctcattattactggacgggtcatagcacagcaaatattcggtatcaggtagcggcggtaagccatctactccactcagcacacgcaagtccggactcatcatctcgaccggccttgccgtcacgccaagaccggctttcactgccgcacgaacggccggaagcgtcgaggcgacataagccagtcgccagggaatatctgctttattaagcgtcgccagcaccatatcgcgaaacggacttggatcatccagcaatacaagagggatcggctcacctttttgcaatacgtattccgctgcgcagtaccagtgtgttggcgaggtacgcaggttcaatgccttaaacgctgaaggacgatgggtggttaccatcaaatccacttcctgggattccagcatttctgccatataggcattacgtttaacgcggacatccagcgctaatttcggataaaccgaactcacgcgatttaacaggaaaggtaagatcgtatcggcagattcatctgaagcaccgatagttaacacgccctgaagattactgaacattaatgatgagcaggcctcatcattaaaacgcaggattttcctggcgtaaccaagaagttgaatgccatgttcagttaacagtttgttgcgaccgtgacgagcgaacagttctttcccaacgagttgttccagacgctgcatttgctgacttacggcggactgagtacgacacacagcggcagctgcggcagcaaaagtgttcagatcggcaacagcaacaaatgttctcagcagatcgaggtcgaggttaattatcggacgatttgcacttatcatatattatcacttactggcggctcatactgagctggttaatgctgtgcacacacaaacaagcaattccatttgtaatgtgcctccctggcagtttcatccggaacccggacgaaagtaaaaatgcatatgagttgcactaaaaaagcgactcacattgttccgttataatgcctgaagtagatcacagaatatatcttcagggatcgcatatctattaagttactcactcttttctatttatgacatgcgcgtgtttgtataaatgtaaatgtgagtccttgttccactctcgtgcagcatcgctggtcatacgcgaacacgtacaaacagcaatggtgaggcggcatcaagagcagggatccgtcatttatgcgagcattttaccccaaaaaccttttatttataagggtcattgcgaattatctgatgcaaagttatgttatgttaggcaaagtaatcttctattattaataagcacatcaaaacctttttgaatattaaataataattaattagcatcatcctcattcattaattccgcttaacaatagtttcacaccttgcccccattgcgacacctcggaaatcatcacgctgttaaactctccgtaatgcggaaatatcatcatcgcgtttcattagtgaattcttaaatgaggcattttcacacaattatcttacagataaaaaaaccagacttacaattaagaatcagaacaattcactatataacattgcatgcaaagcatatacacctcattattttgtcattattaagttattaacagcacaatcgagccttcccctctggcaaaatcttattctgcagaccttcaaaacaccgtcctgggggagtacattgttctaagctgacttccacggcagggagtggcgataacagcaaaaaaggtcaagattcatgtcccccattgaaaaatccagcaaattagagaatgtctgttatgacatccgtggtccggtgctgaaagaagcaaaacgcctggaagaagaaggtaacaaggtactgaaactgaacatcggcaacccagccccgttcggttttgacgcgccagatgaaatcctcgttgacgtgatacgcaacctgcctaccgctcaagggtattgcgattccaaaggtctttactccgcgcgtaaagccatcatgcagcactatcaggctcgtggcatgcgtgatgttaccgtggaagatatttacatcggcaatggtgtatcggagcttatcgttcaggcaatgcaggcattgctgaacagcggggacgaaatgttggttcctgcaccagattacccactatggaccgcggcggtttcgctttccagcggtaaagcggtgcattatctttgcgatgaatcctctgactggttcccggacctcgatgatattcgcgctaaaattacgcctcgtacgcgtgggatcgttattatcaacccaaataacccaaccggcgcggtatattccaaagagcttttaatggagattgtggagattgcacgtcagcataatctcattatcttcgccgatgaaatttatgacaaaattctctacgacgacgctgagcatcactcaattgcgccgctggcacctgacctgctgaccattacctttaatggactgtcgaaaacgtaccgcattgcaggcttccgtcaggggtggatggtgttgaacgggccgaaaaaacacgccaaaggctacatcgaaggtctggaaatgctggcttcaatgcgcctgtgtgctaacgttcctgcgcaacacgccattcagaccgcgctgggtggttatcagagcatcagtgaatttattacccctggcggtcgtctttatgagcagcgtaaccgcgcgtgggaattgatcaacgatattccgggcgtttcctgcgtgaaacctcgtggtgcgctgtacatgttcccgaaaatcgacgccaaacgctttaacattcacgacgatcagaaaatggtgctggatttcctgttgcaggaaaaagttctgttggtgcaagggacggcattcaactggccgtggccggatcacttccgcattgtcacgctaccgcgtgtcgatgatatcgagctgtcgttgagcaagttcgcgcgtttcctttctggttatcatcagctgtaatcttaatttcactgccggagattgcatccggcagtgttatcccgccacaatgacctgatgatgtcatcatacgtaaggtcactatgaaacagagccatttttttgcccatctctcccgcctgaaactcattaaccgctggccgctcatgcgcaacgtgcggacggaaaatgtgtccgaacacagtttgcaggtagcgatggtcgcccatgcgctggcagctatcaaaaatcggaaatttggcggtaatgtcaacgccgaacgtatcgctttactggcgatgtaccacgatgcctcagaagtgctcaccggcgatctccctactccggtgaaatacttcaattcgcaaatcgctcaggagtacaaggctattgaaaaaatcgctcagcaaaaactggtcgatatggttccggaagagctgcgggatatctttgcgccgttaattgacgagcatgcatatagcgatgaagaaaaatcgctggtgaaacaggcagatgcactgtgtgcatatctgaaatgtctggaagaactcgcggcgggaaataatgaattcttgctggcaaaaacgcgactggaagcgacgcttgaagcgcgccgcagccaggagatggactacttcatggaagtatttgttcccagcttccatctttcgctcgatgagattagccaggattcaccgctgtaagcagctggagtctgcgtcgcatcaggcaataagcgccggatgcgacatcaggctcttgtcaaaacggaaacagcatcgggatcatcaccacacaaaccgccatcacgataatggtgaacggtacccccagcttcacaaagtcactgaagctgtaatttcccggacctaaaaccaatgtgttaacaggtgaagaaaccggtgtcataaaggnggcggatgctgccatcgccacgaccatcgcgaatggataaggcgacacccccatcgttttggcagcagccagcgcaatcggagccatcaacaccgccgtcgcggtattagagataaatagcccaataaccgccgacaagacaaacaaacaacccagcatcatatgtggcccgtaaccaccgccaatgtccatcagccctttcaccgccagcgcgacacctcccgttttctgtaatgccacagcaaacggcatcatcccaacgatcaaaataatgctcggccagtgaatggatttataggcgctttcagcatctatacagcggaatttccccatcagcaggcaggcgatgatagcggcaacaggattaggaatttcatctgtcagcattaacgccaccattagcaccagacagaaaatggcatggggtgcctggctgtgcgcgggcgatgcttcactcacctcttccggtaagttcagcgctacgaagtcgcngccctgtttggccagcataccgatcagtttccagttacccacaaccaggatgatatcgcccagcagcagaggctcatccgccagcgaaccttccagcgccacgccattgcgctttagccccaccacattcagtccgtagcgggtacgaaaaccaatttcgcgcaccgatttaccaatcagttctgactcaggaattaatgaaatctctgccatgcccacatcaagggcctggtcagaaaaatactcgccgcgcagtaccatcggctccagcaattgctcactacaaaattgccggagatcgacatcagccgcagacatatcaataagcaaaacgtcacgcgcgcgaaattcagaaaccccattaacgttcacgataacgcgacgaaaacgccgccagcgttcaacaccgatgacgttagcgccataacgctcacgtaatttgagatcatccagccgttgaccaatcattggcgatccggggcgaatagccagacgtcgcgcacgcccggtcagtcgatattcacggataagatcgcgaaaggttcgacgcgtccagcnttcgcgctgcggggtctgggtatcccctttcagcatgaaacgcatcactaacatatacaaaatacccagcaccagcacgaccagaccaataggtgttacgctaaagaaactgaagccgtgatagccttcacgcagcaattcactgttgactaccaggttcggcggcgtcgccaccagcgtcatcatgccgctaatcagcccggcaaaacttaacggcatcatcagacgtgacggcgaagtttgcatacgcatggcaacgcttaacaccacgggaataaagatagcgacaacgccggttgaactcataaacgcgccaagccccgcgacggtcagcatcaacaaaaccaacattttgatttcactgttgcccgcaactttgaccagccatgttcccattacggtggcaacaccggtacggaccaaaccatcgccaataataaacaaggcggcaatcaggacaacgttaggatcagaaaagccggaaaatacttctgggactgtcagcgttccgcttaatgcaaacgcgacaataacaaacaaagcgaccgcatccatacgcactctgcccgtcgcaaacaagacgatggcaacggccagtaatgaaagaacccaaatcaattcaccgttcacaacttatccttgttaattgagggggatgacttgattctgccataaaaaagccccgacgagacggggctaaatcatgatcaggtgtttcactgaataataacatcgccatttggctgtttggtcacagtaatttgctccagactgtggaggaccaaatcgacctcattcaggcgcggggtatctgccggagcgttaaccgcaatgacatggcaacccgccgccaggccagaaagcacgccagcgggagcatcttccaccaccacacactcctgcggcgcaagccccagcagctgcgcgcctaacagatacgcatcaggttctggttttccgcgcttcactcgctcagcgcttacaaacacctctggtgcgggaagccccgctattttatggcgcgctcgcgctaccggcatggagccagaagtcacaatggcccacggaatacctgctttattcaaatgattgagtaaggcgattgcccccggaagcgcggtaataccttcggtttccgtggcctcgatttgctccagacgcgtaaactcggcggcaatatcagcctcggatttgcccgccataaaatggcgcagagaggtgatcgcctgtttaccgtgaatgaaagccagcacctcttccggcgctaacccatgacgtctggcccagttgctccacgcccgttctaccgcaggcagggaatccaccagcgttccatcaagatcaaacagaaaacctttgcaccgcacgcgggcctcctcaggcgttgataatttgattaatttcgttggcgctcaaatggtactgacgcgggcaggcatgccacacattaagcatgcgctgatatttttcccacattggcgtctgggcgttaaaaccgtgagttccggcgtcaaaatgggtatagcgcccttccacattaaccataaagcggacataaccgaggtaacgtgcttcagtggcggcgtcaaagccgaggaaggtgacacgacgttcatcgatggattgctggtcctgcaaattagaccaggaaacatgcaacgcatgatacatctccataatgtcgatgatagtgcggcaggtttcttctttcagctcgccaaactcgcgatccagttcacgcatctgtaatccataaccccgctcaatgattgtttgcaggcgacggtaacgttcagcatttgccggatcgagcatagtcatcatcttgtactggttagacaaaataagacgttgcgcgttggtcatttccattgttgactcctgtatcactctactacggtgaaaaaaaagaaggctgagtatgccttcttttatatgcgtaatcaggggtcaattacaaatcatcaaggaaagttttatccagttgtttgaaggcacgcttaagcgtgtcagctaatgcctggtaatcaggcttgccttcaacgggtgccaacacctgtccagactcctgcaatttaccgcgaacttcataaaaccagttgaggattgcagggggtaatggcgtgacagaacgnttgcccagccaccacaatccctgcatgggtaaacttaaggcgaacagggcagtggcaactgccggcccaagctgaccgcccagggcaatctgccagcagagagtaaatacggcgatcggcggcataaaacggatcgcataacgcgtcatcttgataacgcgattttcgacaaagaccggggcaaggcgtttttccagcggccacgtctttgagtaatgctgtccccggcgaaacaagctaaaaaaattaacagaacgattatccggcgttgacatgcttcacctcaacttcacatataaagattcaaaaatttgtgcaaattcacaactcagcgggacaacgttcaaaacattttgtcttccatacccactatcaggtatcctttagcagcctgaaggcctaagtagtacatattcattgagtcgtcaaattcatatacattatgccattggctgaaaattacgcaaaatggcatagactcaagatatttcttccatcatgcaaaaaaaatttgcagtgcatgatgttaatcataaatgtcggtgtcatcatgcgctacgctctatggctccctgacgtttttttagccacgtatcaattataggtacttccatgtcgagtaagttagtactggttctgaactgcggtagttcttcactgaaatttgccatcatcgatgcagtaaatggtgaagagtacctttctggtttagccgaatgtttccacctgcccgaagcacgtatcaaatggaaaatggacggcaataaacaggaagcggctttaggtgcaggcgccgctcacagcgaagcgctcaactttatcgttaatactattctggcacaaaaaccagaactgtctgcgcagctgactgctatcggtcaccgtatcgtacacggcggcgaaaagtataccagctccgtagtgatcgatgagtctgttattcagggtatcaaagatgcagcttcttttgcaccgctgcacaacccggctcacctgatcggtatcgaagaagctctgaaatctttcccacagctgaaagacaaaaacgttgctgtatttgacaccgcgttccaccagactatgccggaagagtcttacntntacgccctgccgtacaacctgtacaaagagcacggcatccgtcgttacggcgcgcacggcaccagccacttctatgtaacccaggaagcggcaaaaatgctgaacaaaccggtagaagaactgaacatcatcacctgccacctgggcaacggtggttccgtttctgctatccgcaacggtaaatgcgttgacacctctatgggcctgaccccgctggaaggtctggtcatgggtacccgttctggtgatatcgatccggcgatcatcttccacctgcacgacaccctgggcatgagcgttgacgcaatcaacaaactgctgaccaaagagtctggcctgctgggtctgaccgaagtgaccagcgactgccgctatgttgaagacaactacgcgacgaaagaagacgcgaagcgcgcaatggacgtttactgccaccgcttggcgaaatacatcggtgcctacactgcgctgatggatggtcgtctggacgctgttgtattcaccggtggtatcggtgaaaatgccgcgatggtccgtgaactgtctctgggcaaactgggcgtgctgggctttgaagttgatcatgaacgcaatctggctgcacgtttcggcaaatctggtttcatcaacaaagaaggtacccgtcctgcggtggttatcccaaccaacgaagaactggttatcgcgcaagacgcgagccgcctgactgcctgatttcacaccgccagctcagctggcggtgctgttttgtaacccgccaaatcggcggtaacgaaagaggataaaccgtgtcccgtattattatgctgatccctaccggaaccagcgtcggtctgaccagcgtcagccttggcgtgatccgtgcaatggaacgcaaaggcgttcgtctgagcgttttcaaacctatcgctcagccgcgtaccggtggcgatgcgcccgatcagactacgactatcgtgcgtgcgaactcttccaccacgacggccgctgaaccgctgaaaatgagctacgttgaaggtctgctttccagcaatcagaaagatgtgctgatggaagagatcgtcgcaaactaccacgctaacaccaaagacgctgaagtcgttctggttgaaggtctggtcccgacacgtaagcaccagtttgcccagtctctgaactacgaaatcgctaaaacgctgaatgcggaaatcgtcttcgttatgtctcagggcactgacaccccggaacagctgaaagagcgtatcgaactgacccgcaacagcttcggcggtgccaaaaacaccaacatcaccggcgttatcgttaacaaactgaacgcaccggttgatgaacagggtcgtactcgcccggatctgtccgagattttcgacgactcttccaaagctaaagtaaacaatgttgatccggcgaagctgcaagaatccagcccgctgccggttctcggcgctgtgccgtggagctttgacctgatcgcgactcgtgcgatcgatatggctcgccacctgaatgcgaccatcatcaacgaaggcgacatcaatactcgccgcgttaaatccgtcactttctgcgcacgcagcattccgcacatgctggagcacttccgtgccggttctctgctggtgacttccgcagaccgtcctgacgtgctggttgccgcttgcctggctgccatgaacggcgtagaaatcggtgccctgctgctgactggcggctacgaaatggacgcgcgcatttctaaactgtgcgaacgtgctttcgctaccggcctgccggtatttatggtgaacaccaacacctggcagacttctctgagcctgcagagcttcaacctggaagttccagttgacgatcacgagcgtatcgagaaagttcaggaatacgttgctaactacatcaacgctgactggatcgattctctgactgccacttctgagcgcagccgtcgtctgtctccgccagcgttccgttatcagctgactgaacttgcgngcaaagcgggcaaacgtatcatactgccggaaggtgacgaaccgcgtaccgttaaagcagccgctatctgtgctgaacgtggtatcgcaacttgcgtactgctgggtaatccggcagagatcaaccgtgttgcagcgtctcagggggtagaactgggtgcaggcattgaaatcgttgatccagaagtggttcgcgaaagctatgttggtcgtctggtcgagctgcgtaagaacaaaggcatgaccgaaaccgttgcccgcgaacagctggaagacaacgtggtgctcggtacgctgatgctggaacaggatgaagttgatggtctggtttccggtgctgttcacactaccgcaaacaccatccgtccgccgctgcagctgatcaaaactgcaccgggcagctccctggtatcttccgtgttcttcatgctgctgccggaacaggtttacgtttacggtgactgtgcgatcaacccggatccgaccgcagaacagctggcagaaatcgcgattcagtccgctgattccgctgcagccttcggtatcgaaccgcgcgttgctatgctctcctactctaccggtacttctggtgcaggtagcgacgtagaaaaagttcgcgaagcaactcgtctggcgcaggaaaaacgtcctgacctgatgatcgacggtccgctgcagtacgacgctgcggtaatggctgacgttgcgaaatccaaagcgccgaactctccggttgcaggtcgcgctaccgtgttcatcttcccggatctgaacaccggtaacaccacctacaaagcggtacagcgttctgccgacctgatctccatcgggccgatgctgcagggtatgcgcaagccggttaacgacctgtcccgtggcgcactggttgacgatatcgtctacaccatcgcgctgactgcgattcagtctgcacagcagcagtaacctcgtcatcatccgcagctttgcgctgcggatatctgaaccggaaatagtcactatttccggttttttattctcttaatttgcattaatcctttctgattatcttgcttaactgcgctgcatcaatgaattgcgccatctcactttgcatacttaccactttgttttgtgcaagggaatatttgcgctatgtccgcaatcactgaatccaaaccaacaagaagatgggcaatgcccgatacgttggtgattatcttttttgttgctattttaaccagccttgccacctgggtagttccggtggggatgtttgacagtcaggaagtgcagtatcaggttgatggtcaaacaaaaacacgcaaagtcgtagatccacactcatttcgccttctgactaacgaagcaggcgaacctgagtatcaccgcgtacagctgttcacgacgggcgatgaacgcccgggcctgatgaacttcccgtttgaagggttaacctcaggatcgaaatacgggacagccgttggcatcatcatgtttatgctggtgattggcggcgcgtttggcattgtgatgcgtacaggaaccattgataacggtatcctggcgcttattcgccatacccgtgggaatgaaattctctttattcctgcgctgtttattctgttttcacttggcggcgcggtatttggtatgggggaagaggccgtcgcctttgccattatcatcgcaccgctaatggtccggctgggctatgacagtattaccaccgtcctggtgacctatattgccacgcaaatcggttttgccagttcgtggatgaacccgttttgtgtggtcgttgctcaggggattgccggcgttccggtgctttctggctccgggttgcgcatcgtggtgtgggttatcgccactctgattggcctgatctttaccatggtgtacgcctcacgagtgaaaaagaatcctcttctgtcacgcgtgcatgagtccgaccgcttctttcgtgaaaagcaggcggatgttgaacaacgtcagtttacctttggtgactggctggtattgattgtcctgaccgccgtaatggtctgggtgatttggggcgtgatcgttaatgcctggtttattccagaaattgccagccagttcttcaccatgggtctggtgattggcatcatcggcgttgttttccgccttaacggtatgacggttaataccatggcttcatccttcaccgaangggcgcgaatgatgatcgcccctgccctgctggtgggtttcgccaaagggattttgctgctggtcggtaatggtgaagcgggtgatgccagcgtgttaaatactatcctcaacagcattgccaatgccattagcggtctggacaacgcggtcgcggcctggtttatgttgctcttccaggcggtatttaatttcttcgtgacgtccggttctggtcaggcggcgttaaccatgccgttactggcaccgcttggcgatctggtcggtgttaaccgtcaggttaccgtgctggctttccagtttggtgatggcttcagtcacatcatttacccgacctcagcttcgttaatggcgacgctcggtgtttgccgggtggacttccgtaactggctgaaggtgggcgcgaccctgcttggactgctgtttattatgtccagcgtcgtggtgatcggcgctcagttgatgggctaccactaaaaatgttaagagccgcaattgcggctcttttttcattctgccgtttcagtctctacggcttcatttttggcattgcgcttcatccacaacgctagcgctttcagcgagtctggagtgaactcatcgcagcgtgcggtgatttcttccggcgtcagccagcaaacttcactgacttcatcttcctgtagggcgaagggaccgtgagagacgcagctgaacaatgcgccccagacacggcaatttttatcttcgaaatagaactgcccgtgctcggcaaaggggacaccggcaatgcccaactcttcttccgcttcgcgacgcgcggattccagcagttgctcatcggcctggactacaccgcctgcggtcgcatctaacatgccgggtaaaaagtcttttgtctcggtacgacgctggaccagaattttgcccatgccatcatgcacgacgatgtaagttgcacgatgacgcagacactgtgcccgcatttgctcccggctggcttgtgcaatgacttcgttctcttcattgacaatatccacccattcagtacttgccaaacgacgctgttccattatcaggaaaccttctttttctggcgctcttacggcgcattttgagttgtgggtaaattacggattaatcgcgacctgcgcaatgatactttgatcattaagtgcgattacactaagtacgtcattatccagcatgccataactcgccggattaccgcctttcggaatactcaccgagccggggttgaagtggaaaatctccccccgctgttctgctactggcagatgggtatgaccgtaaaccagcacatcgttctggtttaaagcaggcagattttccgggncaaaaagatgaccatgcgtcaaaaacagacgttgtttttccagtaatacctgttgccacggcgcggttatcgggaaatgcagcagcatttgatccacttcgctgtcgcagttgccgcgcacagcgataaccttatgtgccacttcattaagccgttcagcgactttggctggcgcgtaaccctccggtaaagcattacgcgggccgtgattcaacacgtcgccaaggatcaccagccactgggcaccgctttgggcaaacaactccagaacacgttccgtcgccggtaacgacccatgaatgtccgatgcaaacatcagtttcatcactcactcctcgtcgaaaaaacgtaagctatgatactggattctgtcgttgctatcagccagattgcttcgctgaaagtgcaataaaacgctggacagacgctcgctgccactggaatgtcgcataatccaccaggcattctggcacctcatcgccatgtagtaccaggcggttaatcattagcgccagatcagtatcagcaatgcaccattcaccaaataaattcggctgacccagtactaacaaatgttctgccatcgcgaacagtttctctgcactggcttttccctcggccgttagtggcgcttttttcgcccccgcaaagacaacatctgtcggacgctcttcgcggatgggcatcagatcgctgcgcaaccaggcctgaatctgtcgtgcacgcgcacgattttctaaatcaagcggataaatacgttcccaggtcggtggcgcaaatcgatcttccagatactccgcaatggcagaagattcactcaactcaaaatcatcgatttgtaataacggcacacggcgtgtctgaccgtaaccttgccacgtcggttgcaaatgttcaccgctgtcgaggtcgatggtcttgatatgaaacaacaggcctttttcctgcaacgccacccaagcggataacacataaggggagaaaaaatgggcatctgaccaaagcgtgatagcgggtttactcattatgtcctcggcaataaagggggctggctatcaaactatagagcctttttgtcactgtcacgtgacgaatactcacgtaagtcgccgcgctttctataattgtggtgttcagatgattagacaaccggagctccaatgatcgatctctatttcgccccgacacccaatggccacaaaattacgctgtttctcgaagaagcagggctggattatcgcttgataaaggtagacctggggaaaggcggtcagtttcgcccggaatttttgctcatttcgcctaacaacaaaattccggcaattgttgatcattctccagccgatggcggcgaaccgctaagcctctttgaatctggtgccattttgttgtatctggctgagaaaacggggctctttttgagtcatgaaacgcgtgaacgcgccgccacattacagtggttattctggcaggtaggcggactggggccgatgcttgggcaaaatcatcattttaatcacgcagccccccaaaccattccttacgctattgaacgttatcaggttgaaactcagcgtctgtaccatgtactgaacaagcggctggaaaactcgccctggctgggaggcgagaactacagcattgcggatattgcctgctggccgtgggttaatgcctggactcgccagcgaatagacctcgctatgtatccggcagtcaagaactggcatgagcggatccgttcgcgccctgccaccgggcaggcactgctaaaagcacaactcggtgatgagcgttcggatagttaacagaaacaggttctcgtgtattatttcatcctaagtaaaacaacggagaacctgcaatggcacaacctgccgctattattcgtataaagaaccttcgtttacgtacatttatcggaattaaggaagaagaaattaacaaccgtcaggatattgttatcaatgtgacgatccactaccccgccgataaagcgcgcactagcgaagatatcaacgatgcgctgaattatcgcaccgtaacgaaaaacattattcagcatgtagagaataaccgtttctctttgctggaaaaattaactcaggatgtgctcgatatcgcacgtgaacatcactgggtgacgtatgctgaagtggagatcgataaactgcacgcgctgcgntacgccgattcggtatccatgaccttaagctggcagcgttaaccgccatatcgggaggctgcatgaacatagtgatcaccggagggacgggattaattggtcgccatttgattccacgtttgctggagctgggccatcaaatcacggtaatgacgcgtaacccgcagaaagccagttccgttctcggccctcgggtgacactatggcaagggcttgccgatcaaagcaacctcaacggcattgatgcggtaatcaacctggccggagaaccgattgctgataaacgttggactcacgagcaaaaagagcgtctctgccaaagccgctggaatatcacgcaaaaactggtcgatttgattaatgccagcgacacgccaccgtcggtactcatttccggctcggcaacgggctattatggcgacttaggtgaagtggtggttaccgaagaggaaccgccgcataacgaatttacccataaactctgcgcccgctgggaagaaattgcctgtcgggcgcaaagtgacaaaacgcgagtgtgcctgctgcgtaccggcgtagtgctggcaccggatggcggtattctcggtaaaatgctgccgccgtttcgtcttggcctgggcgggccgattggttccggtcggcagtatctggcctggattcatatcgatgatatggtcaacggcattctctggctgctggataacgagctgcgcgggccatttaatatggtttcgccctacccgatacgcaatgaacaatttgcccatgcgctcggtcatgcgctgcatcgcccggctattttgcgcgtccccgcaaccgccattcggctgttaatgggcgaatcttcagtactggtattaggtggacaacgcgcgctgcctaaacggctggaagaagcgggttttgcgtttcgctggtacgatttagaagaggcgctggcggatgtcgttcgctgatgtggtttactgcaaacatccgccagttaactcccggtgttacagggttagtggctttgcgcgataagatcgtctggtgaaagtcgggtcagcgtcaggatgacttcgtggtcaaatcctttttccagcatctcctgagcaatacgcagagcttcttcgtgtttgccctgcattgcgccttcttcacgtaatctgtcagcaatggtcatcagtttctccttttcttgtggtgcgcgttctgttatctcaccaataaatgcacggaaacgctgggcatctcccgtttgtaatacataattaaacagggcttttagctgtctgtcattagtgttccctgtaactagcagcgaaacaatttggtcgactaatcccaacagatcgcgctgacgaatatgtttctgaattaactccaacagcgccattttacgatgttgcataatctcgtcatccggcaccacggtaatatccaccaacggaaaagccgatgaatatattttacgggcaatcgcaggctcggcaaattcatcaagccagcagagtgaataaggataaggacttctgcaaccatgataaaacagcatcgggatcaccaatggaagctctttatagcccgcatcaagatggttttgcattgccgcaatggaataacgcatcatgcgaaaagccattaattcttccggcttactttggtgctctatcactacataaagataacccactccctcctgcgttttcacagaccacaagaggtcggaataatattgccgcaggtcttcatcaataaaactgtttggttccagtttaagcgtcgttaaatcacacagtttgcgcagcggcgcgggaagatgaatatcaataaaatcccgcgcggtgtctggatggcgtaaaaaagatttaaataccgcatcatgcggcgtggaagttgtcgatattgtcatggcgttccgtcacccctcaaatttaagatgacgcgacaataaccacgattaacacccaatgcagcaggcagtttttatctttggacagcgaattcagaagtatttttagcggactgcaacttttacatttcagcggaagctgactcgcaaattccccttgaaaatactccggcagcgttagccaccggagaggcaattatttcagcgaacctttaaggaactgttgcagacganggctttgcgggttgccaaataactgctccggcgcgccttcttcctctattttcccctgatggaggaaaatgacgtgagtagaaacatggcgagcaaagcccatttcgtgggtcaccaccaccatcgtttttccctcttccgccagctgctgcataatgcgcagcacttcacccaccagctctgggtcaagggccgatgtcggttcatcaaacaacagaacttccggttccattgccagcgcccgcgctatggaaacacgctgttgctgaccaccggacaggtgcaccgggtatttcccctgcgcacgttcgtctatcccgacttttgccagatacttcaccgcccgctcgcgcgcttcctgcttgctcaggcccaacacctgaatcggcgcttccatgacgttttccagcaccgtcatatggctccagagattgaagtgctggaataccatcgtcaggcgtgtgcgcagtaagcgcagttgatttttatcggcgactttgagttgaccgtctttgtcgcgcaccagattgatcgtctggccattgaccacgatcgacccttcactcggtttttcgaggaagttaatgcagcgcagaaaggtacttttccccgatcccgacgatccgatgatgcttattacatctccggcattcgcttgcagtgacacccctttcagcacttcgtgttcgccatagcgtttgtgcaaatcgataacgtttaatttattctcggacatcgtattctcagtgcgttgaagaaggtttcacatgctgcaaccagcgtttttccgctctgcgaaagaggctgatcaggacataagagatgattaaatagagcaccgcggcaatgccgaaggcggtaaaaggttgatacgtggcggcgttaatatcgcgggctattttcagcagatccggcaccgtggcagtaaatgccaacgcagtagagtgcagcatcaggatcacttcgttgctgtatgccggtaacgcaatacgcagcgcagaaggcaaaataatgcagcgatacattttnaaagtcgagaagccataggntctggcggcttcaatttccccatgcggcaccgaacggattgccccagcaaaaatntcggtagtgtaagcgcaggtgttaagcgtcagcgccagcacggtacagttcaggccactgcggaaaaaggcgttaagaaactcggtccccttaacaatctccagcgtatacatgccggaatagaacaccagcaactgaacatacagcggcgtaccgcgaaaaatataggtaaataaccagattggaaactggatgtatttattactggagacacgaccaatcgccagaaacagcgccaggantccgcctatcactaccgacaaaataagcagccacagagtgatcgccacaccagtaaagcgataaccgtcggtccacagcagcggtttccagtattcatgtaagatttcgatcacaggtcagccctcttcacacctacagagtagcggcgctcaaggaacagcagcacaccattggaaacggtggtgaaaaccaggtaaatcacgccacagacgatagcgaaatagaacggttcccaggtacttttgcctgccagctgcgtggctttgaccacatcttccaggccgagtaacgaaaccagtgcggtagatttgaggatcacctgccagttgttgccaatgcctggcagggcgtaacgcatcatcgccggaaacatgatccgccgaaacacttgcccacgagtaaaaccgaacgccgtcgccgcctctatatgtcctttcggcactgccataaaagcaccacggaacgtttcggtaaaataagcaccgtagataaaaccgagagtgataataccagcgaccatcggatcgatatcaatctgcccgacgcccatcgcctccgtcaccgtgtttagcgcaatctgcaaaccgtagaaaatcagcagcatcaacactaagtccggcacgccacgaatcagcgtggtgtacccttcgaaaatcagccccgaaagccgattttgcgagagcttaccgccagcgccaattaaaccgatgattacagcgagcactacagagctgatagccagctccagcgtgacgagcgcaccctgtaaaataacacctgaaaacccatacaacatgctgcctgtcctgtcgtgtgtggtgaattaccgcctcttgtctccctccggttacccgaagggagcgggctttctttcaccgatggcgattaaccaccataaacatcaaaatcgaagtactttttcgctaatttctcgtaagtaccgtcagcgcgcatttcggcaaaggctttgttcagtgcctcgcgcagttcgttatcttctttacgcaggcccatgccggtccctacgccaaacagtttttcatctttaacagacgggccaccgaatttgtaatctttaccgacaggttgtttgaggaaaccttcgctggcagcgacctcatcctggaacgcggcatcaatacgtccggcagtcaggtcagaataaatgttgtcctgcccctgatacgagacgatttcaatgccttttggtgcccaatgttcattaccgaacgtctcctgggtagtgccctgcaatacgcctacccgtttgcctttcagcgactcgactgtcggctgaatgtcagaatttttcgccaccaccagacgagaatcggcagcgtacagtttgtcggtgaaggctatttcttgctgacgtttttccgtaatggaaagcgatgacatgatggcgtcaatnttcttcgcttttaaggacgggattaacgcatccagcggattttcgacaaacgtacattgcgtattgatgcgtttgcataattcctttgccagatcgatatcgaagccaaccagttcgccttgtgaattttttgattcaaatggcgcataggtcgggtcggtaccgatgcggatgttttgcggaatcgcagcaaatgtcgcagttgcgctggagaaggccagaaccagagagagcgatagcaccagttttttcataatgtcctcaactgacagtctttttatagggaatatttacaggtttgttacacttatcgtgccataaaattgaccatcaaggcaaaatatcccgccccgttagacgtattatttttcattaaaaatgcttaagtatgcatttcaatgcaccacgatagtgcaacaaacctggcgtgcaccatgatgatcattccatcaggtacagcttccctgcgacgtatcagtcaccgtagacattaaagtcaaaatactttttcgccatcttgtcgtaggtgccgtcctgacgcagctcgccaagcgccttattgaaggcagccgtcagttcagcatcatctttacgtagccctacaccggtgccatcaccgaagtattttttgtcttttactgatgagccagcaaaggcgaaatctttaccagcaggttgcttgaggaatccttcgctggcagcaacttcatcctgcagtgcagcatccagacgtcctgcagccagatcggaatagaccaaatcctggttggcataggccaccacatccacacctttgctacgccaggtctcgttagcgtaagcttcctgggttgatccctgcagcacaccaacatgtttacctttcagtgagtccagcgttggctgaatcggcgaacctttggcggcaatcagacgggaatctgcggcgtacagcttgtcggagaaggcaatctcctgctgacgtttatcggtaatggaaagcgacgaaataatggcgtcgatttttttcgctttcagtgaggggatcagcgcgtcaaagtcactggcaacccaggtacatttcacctgcatccgtttgcacatctcgttaccgagatcgatatcaaagccgacaaagtcacctttggcatctttcgacgagaacggtgcataggtggtatcggttccgatacgtaccgtctccggcaatgccgcatagctggaagccgctgcggaaataccgactaacaaagacagagcgagaatcgacttcttcatacataaccctcaagtgaaaatggcttttttatgttgtgtattgtgttgtgtgtttgcaggcttgttcatgcaggtcttatgccatcttgacgacaacagtaacattcaacgttaaatatgttaataagacgttgcattattgtcctaaagttgaagatagcaggtatagcggttgaatcgcagcgtttcgattgaatggcagaaacaaaatgtcgaggatttgatcgcggttgcaaaattgccctgaaacagggcaacagcggagttatgcgccctgccagcgggcaaagagatcttcaggaagggttatcgcaaactggtcaagaacacgattaaccgtctgatttatcacatcatcaagggattgcgggcgatgataaaacgccggaacgggaggcataatcaccgcaccgatttctgctgcctgcgtcattaaacgcagatggcctaagtgcaatggtgtttcacgcacgcagagcaccagcgggcgacgctctttcagcaccacatctgccgcacgggtcagtaagccatcagtatagctatggacaatgccggacagggttttgattgaacagggtaaaatcaccatccccagtgtctggaaagaaccggaagagatgctggcggcaatatcgcgcgcatcatgcgtgacatcagctaatgcctgcacttcgcgcagggaaaaatccgtttcgagggataaggtctggcgcgccgcctggctcattaccagatgcgtttcgatatctgtgacatcgcgcagaacctgtaataagcgcacaccataaatcgcgccgctggcaccgctgatgcccacaataagtcgtttcataaatagttgccctgtcagacttgcaggcagactttgcaggatttcggcgggagttgcaagtcagggtgccagaccggcaccctgagcgaaggcatcatccttcgttatgcatttcgagattttccacttcgttctgacgttgcactgctttggcgtcgtcattacgtaaagtatcgaggaaatcgaggtagccctgatcaacatctttggtgacgtagacgccgttgaacaccgagcattcaaactgctggatatccgggttttcagcgcgaacggcttcgatcagatcgttcagatcctggaaaatcaacccgtcagcaccgatgatctggcgaatttcatctacttcgcgaccgtgagcgatcagttccgtggcgctcggcatatcaataccataaacgttcgggaagcgaatttccggtgccgcagaagcgaggtacactttcttcgctccggcttcgcgtgccatctcgataatctgctcagaagtggtgccacggacgatagagtcgtcgaccagcaggacgtttttatcgcggaactcggcgcggttggcgttcagtttacggcgcacggacttacgacgcagctgctgacccggcatgatgaaggtgcggccaacatagcggtttttaacgaagccctggcggtacggtttgcccagaatacgagcaatttccagcgcgatatcacacgaggtttccgggatcgggatcaccacgtcgatatccagatcttcccattcgcgggcaattttctcgcccagcttcgtgcccatattcacacgcgcgctgtaaacggaaattttgtcgatgaacgagtccgggcgagcaaagtatacatactcaaacaggcacggattgctgaccggattgtcagcacattgacgggtaaacaactgcccttcttcagtgatgtaaatcgcttcgccaggcgcgacgtcacgcaggaaatcaaagcccagtgtatcgagcgcaacgctttcggaagcgaccatatattctgtgcggttctcgtcaatatcacgttttcccagaaccagcggacgaataccgtttggatcgcggaaagcaaccataccgtggccgataatcatcgccacacaggcatacgcgccgcggattaagcggtttgtagcagcgatggcggcgaaaatgttgtcggcttcaagcgggtagtggcggaagttgtccagctcgctggcgaagatattaagcagaatttccgagtcggaagtggtgttgatgtggcggcgtttttcttcaaacagttttttacgcaactcgtgagcgttggtcagattgccgttgtgggcaagcgtaatgccatacggagagttaacgtaaaacggctgcgcttcagaggcgctggagctgccagccgtagggtaacgcacatgaccaatgcccatattgccctgcaaacgctgcatatggcgagcttcaaatacatcgctcaccagcccgttcgctttacgcaaacggaagcagttattggcatctatggtgatgatgccggcggcatcctgaccgcgatgctgaagcaccgttaaggcatcataaatcgactggttaaccggcataacaccggcgataccgacaataccgcacatacgtctttttcctcgttaagccacatctcagagcacttacgctctgggcaagaaacttgacgagctttgcagataatcaaaaaaccatctgatgataaaactgaactgcggaatcagttgtgatttactccagtcttcgcttttcgacaccccggtaaaggagtcgagaaagaagagaatagcagcaacaatcaacacaccgcgcaatgcaccgaaacagacgcccagcacccgatcggtgcctgacaaccccgttttctccaccagcaggcctatcacgaagttcacgatagcgccaacgatcagggtggcgataaacaggaccgcgatggcaatcccatttcgaaccagttcgtcttcaaagcccgtaaaccagactgacaggtaagtgtagtaatgactggcaacaaagaaagcacaaccccatgtcaccagcgataacgcttcacgaacaaagccgcggatcaggctaaccagagaggaaaaagcaatcaccgcgattatggcgtaatcaatccagaccatatgtgtcccacgattttacgccctgtcatcctgttcggggcgcattctaacagaaaaagaaaacgtttgcgtagggatttccttcccgcgcatcaataaaaatggcgctgaaaaaatattcaacgccatcgactttttatgcctttgcggcatcggacaatgcgtgtcggatgcggcgtaaacgtcttatccgacctacggttctacccctgcgtaggcctgataagacgcaccagcgtcgcatcaggcaacggctgtcggatgcggcgtgaacgccttatccgnnnnnngnntctanncctgcgtaggcctgatnagannnnnnagcgtcgcatcaggcaacggctgtcggatgcggcgtaaacgtcttatccgnnnnnnnnnnnnncccctgcgtnnnnctgataagacgnnccagcgtcgcatnnnnnnnnnnnnnnnnnnnnnnnnnnnnnnnnnnnnnnnnnnnnnnnnnnnnnnnnnngngtaggcctgataagacgcaccagcgtcgcatcaggcaacggctgtcggatgcggcgtgaatgccttatccgacctacggttctannnnngcgtagnnctnntaagacgcgccagcgtcgcatcaggcaacggctgtcggatgcggcgtaaacgccttatccgacctacggttctacccctgcgtaggcctgataagacgcgccagcgtcgcatcaggcaagaccgtattaattcggcgtatagcccattaccacgccacttaagccagaaagttgcttcaactcacccagcgaacctttcagcttatctttcgaggcatccggcccaaccagaatacgggtaattttaccctgcactggcgtggatggcgacgtataaacccgataaccggcaccgcgcagcttaccgacaatctcattcactttatcggcatttttcagcgcncccagttgcacaacataggctttacccgttggcgctgctttttcttccacgaccggcttcggttctggcttcggcgcaggtggtgcttcaaccttcggcttaggcggctccaccggtttcggcttcggtgggacgaccggtgcaggttccggttcaaactcggtgttattggctgcaatagtggccggatcgagcgacggtgctgcggcatcacctgcccgcacctcttccgctgcgccttccggcggttgcgtcggcaacgcctgggtggcggctggcatcatatcaggctcatcgcgatcgcccgcttttggcaccagcgggatagccgaaaactcatcctgataatgttttttctgcccgtccagcagccctggaagtacaatcacccccagcgccaccagcacgatcgtgcccactaaccgattctgaaacttacttgccaccgcttctcctcgcgtcaatcacttccatgacatgtgcgaccgtgtggaacgaaccacacaccagcacggtgtcttccgctttagcgtccgccattgcggcatcccatgcctgcgcaacgctatcaaatgatttgccgttacccaaatgctcaagcagttgttctgccgtggcaccgcgcggcccttccagtggcgcacaataccagtcatcaaccacacttttcaaccaggccagagttccggcaatatctttatcatgtagcataccgataaccgccagcacgcgcccgtttttcggtagcgttttcatacgcccggtgagatattccgccgcatgtggattatgcgcgacatcaaaaataacgcgtggcgactcgctcacaatctggaaacgtcccggcaaaattgcgctggcaatcccgtcgcgaatggcattttcactgacctccagcccgctggcacgcagtgccgccagcgccgttgnggcattcggttgcgggacaagcggcaacggcaggttttccagcgtgccgtgagcatcgctaaacgcccagtcatgatcggtgacggaatagttccactcaacgccccgacgttgtaacagtgcacctttttcctgcgccacatcagcaatggtagaaggcatttccggctcaccgacaattgccnnnnnnnngctgcgaaagatgcctgctttctcgcgaccaatactttcgcgatctggccccagccagtcggtatgatccagcgcaatactggttactaccgcgacatcggcgtcgacaatattggttgcgtccagacgaccgcccagccctacttccagaatcaccacgtcaagttgtgcctgtttgaacagccacaacgccgacagcgtaccgtactcgaaataggtcagggaaatatcaccgcgtgccgattcaatctccgcaaaagaggcggtgtgggccgattccggcaattcctgaccctgcacacgtacgcgctcggtataacgcaccagatgaggcgaactgtagacgcccactttgtaccctgccgccatcagaatcgactccagcgtacggcaggtggtgcctttgccattcgtacccgcaacggtaaacacaaatggcgctggtttcagaacgccaagacgcgccgcgacctggctcacgcgctcaaggccgagatcgatagttttactgtgcaggttttccagataagaaagccacgaagccagaggcgacgcggcttgaggagtgcgtttgataatcatggtatccgctgattcgttacggtgagaatagcaaaagggcagagccagtggccctgcccttatcagttatcaggcctcaggttcctgatccggtaccgggggtaccactacgccttcacgcggcgcttcaggattcggcgctggcagattcatcaacttcgccagaatgctcgccagtttcaggcgcatttccggacgacggacgatcatgtcgatcgcgcctttctcgatcaggaattcactgcgctggaatcctggcggcagtttttcgcgaacggtctgttcgataacacgcggaccggcaaagccgattaacgctttcggttcagcgatgttgagatcgcccagcatggcgaaacttgcagaaacaccgcccatcgtcgggtcggtcagcacggagatgtacggcaagccgcgctcctgcatttttgccagtgccgcagaggttttcgccatctgcatcagcgacatcagtgcttcctgcatacgtgcgccaccagaggcggagaagcagatcagcgggcagttatcttccagcgcctgctcaacggcacgcacgaaacgtgcacccacaacagaccccattgaaccgcccataaaggcgaactcgaatgccgcagcgacaaccggcattccatacagagtgcctttcatcaccaccagcgcatctttttcgccggtttctttctgcgcagatgccagacggtctttatacttcttggagtcacgaaacttcagcacatctttcggctcaagctcgctacccagctccacaaggcttccttcatctaacaggctatgcaggcgattacgcgctgtcatacgcatgtgatggtcacacttcggacagacctcaagattacgttccagctcagcgcggtataaaacctgaccgcagctatcacacttagtccacaccccttcaggaatgctcgccttgcgggtgggagtaatgttgcttttaattcgttcaatccagctcattagggacctttctgtctgaacctggttcgatgccagttttatctttggggacgcataatgccatttttgcccccaacagaccatgaatgttgcacattaaaacataacagcccgaaactttggataaaaaagtggtcgaaccgcggagttactttttattttgcggnnnnnnnngcancgcgtttgtgacggattatttcgatgacgcccggcaaaatagaaaccacaataatcccgacgatcagcagcttaaggttatcctgaaccatcgggattgtaccgaagaaatagcctgcgtaggtaaaaagcagtacccacaacagtgcgccgatcacgttataagcagcgaaatgacggtacgacatgtggcccattcccgcaacaaacggggcgaacgttctgacgatcggcacaaaacgggcgagaataatcgttttgccgccatgtttctcataaaactgatgggttttgtcgagataactgcgacggaaaattttcgaattgggattactgaataacttttcaccgaacaaccgcccgatagtgtaattgaccgcgtcacccacaatcgcggcgatcagcatcagcaccaccatcatatggacgttgagatcgttggtttccagtgatgccaacgctccggcaacaaacagcaatgaatcacccggtaaaaacggcgttaccaccagaccggtttcacagaacaaaattaagaacaaaatggcataaacccagacgccgtactccgcgaccagctctgccagatgcacgtcaatgtgcaggataaaatcgatgaggaaataaatcaggtccatatttgcctatgccttgtactcgtcatctttcaggctgtaactacgttggctacagcctgaaatgttccgagcattattctcgttagtccgccagaaatagcgggcccattggcggttttggaagatcataccggtcagggtaatccaccgcgaccagatacagcccttccgcttttgccgttgctgccgccagcgttctgtcctttgccgccagcaactctgctatccagctctccggctggttgtgggcaccgacttccatcaggctgccgacaatattcctgaccatatgatgtacaaaggcattcgctttgatatcaaccaccacataaggaccgtgacgcgtgacattaatatgcataacgttgcgccacggggttcgggactggcactgcaccgcacggaacgaggtgaaatcattctcgcccagcaagcactgcgcagcccgatgcatccgttcagcgtccagcggttcgtaaaaatgggttacccctttactcagtaccgccgggcgcagccgataattgtagatgatgtagcgataacggcgagccgtggcgctaaatcgggcatgaaaatcatcaggtacagctttaacccaacgcacggcgatgtcaccaggtaaattcgcatttacgcccaacgtccacgcagcgtctttgcgctgcgcggtagtttcgaaatgcacaacctgcccggtaccgtgtacccctgcgtcagtacgcccggcgcagaagacggtgatgggttcgttcgccacctgggagagcgccttttccagcttctcctgcacactgcggacttcattctgccgttgccagccgtaatacttactgccgtcgtactcaatgcccagcgcaattttataaactggcggttgttgctggtcggacattagtacagatactcctgcaccagtttctcggcgatttttactgccatcagcgngccgccaaagcgaacgttatcggccaccgaccagaactggacttgctccggcataccgtagtcattacgcacgcagccaacagaaagatgcggcgtacccgaagcatcacctacctgagttgggaattcgttctcttcagagagcacaatatcttccccttgaacaaacgcatcacgcgcttcttctgctgccagtggacgcagagcttcaaagttgaccatctgggcatgaccgtagaataccggtgcctggacgacgcttgccgaaatcatcagtccttcgtcctgcaggattttgcgtacttcgtcaacgatacgacgttcttcacgcacgctaccttcgctatccggcagtaacggcagcatgttgaacgcgagctgacgcccgaagaaatcttcttcgtcaatcggaatgccgttgagcaatttcgcantctgccccgctaacgcatcgaccgcttttttgccctgggcggaggctgaaatcaggctggtaacactgatacgcgacaaaccgccctgatcgattaacggtttcagtgccgccagcagctggctggtcagactgtctggtacggcgatgacattccggttgcggtaatcggtcagtacaaacgggtttacttccggcaccaccagcggtacgtcgggttcgagagcaaacaatccgctgctgtcgatcaccaggcaacctgagttggtcgcttcttcaacccaggctgcggtagcttctttgcctgcgacaaaaaatgccagctgcgcctgcgtccagtcgaattcagcagcatcctgcacggtgattgtcttaccaccaaagcgcaattgttcgcctgcgctttcgttacgtgccagtgcataaatttccccaaccgggaactgacgttcagccagcgtttcaagcagggcttcgcccacagcgccagttgcncccaggacggcaatgttccagccttcagacatggtggtttactccagaaatagcaaagctccctgccaatgttatagcagagagcatgaagaagagattaacgtgccggatgatgaacggcgttaaaacccagtttacacagcaatgatgccgcactggcgtcatcacaaattacatacagagatgaccattcacggcgctcaagatagtttttgcgcagtttatcgaactcacccggtatcccggcgactttacgcagcggtgcgtcatcgcggcgcacatcatacaccaaatgcaccagccttttcagcgtcggttgatcgagcggtccatgcagagtaatgcgaccaaactctggcgcaggcagtaatgtatccagcgcaacgtgctgttcatgcccaataaacttgctataggcttcaaacacttgcgtagtaccgcgtgctttaccttccagggtatagcctgcaatatgcggcgtgccgatatccacttttgtcagcaattccacatttagttccggttcgccttcccagacatccagcactacgcttaacttctggccttcattcaggcaggtcagcancgcggtattatcgacgactgcgccacggcaggcgttaatcagaatcgctccgggcttcaggctacggatcagtttttcatccgccagatgcagcgttttgtacggcccgtctttgaagagtggcgtatggaaagtcagaatatccgcgcgctggactaactcatccagcgagcggaaatcaccctcatccccacagtcggcgcgaggcggatcgcaaagtaaggttttaatccctaacgcttccagtcgtgcctgtaaacgccgaccaacgttaccaacgcctacgatccccacggtacgctcgtgcagtgaaaatccatcgcgttcggcaagcatcagcagggaggagaaaacatattccaccaccgcaatcgcattacagccaggtgcagcggaaaaaccaattcccgcctgcttcaaccatgcttcatcgacatggtcggtccccgcagtggcagtgccaacaaatttaatgggttttcctgccagcaaagattcattcactttcgtgaccgaacgcaccatcagcgcatccgcgtctgccagttgagcgacggggattggacgcccgggaaccgcgatcacctcacccaaacggctaaataagtcgcgggcataaggcatattttcatcaacaaggattttcacgtttgtgttacctgtatgagacgagagttaaccggacaagtgtgccataatctcgcggccaagcatacttgcgaagatttcaggtataaggatacgtaatgatacaacctatttccggccctcctcctgggcaaccaccaggtcagggagataacctgccgtctggcgcgggcaatcagcctttatccagtcagcaacgtacttcgctggaaagcttaatgacgaaagtgacctcactgacgcaacagcaaagagcagaactgtgggcgggtatcaggcacgatattggtctgtcgggagattcaccgctgctttcgcgtcacttccctgccgctgagcataatctggcgcaacgtctgctggccgcgcaaaaaagccattctgcccgccagcttttagcgcaattaggggagtatttacgtctggggaataatcgtcaggcggtcacggattatatccgtcataactttggtcagacgccgctgaatcagctctcaccggagcaattaaaaaccattctcaccctgttgcaggaagggaagatggttattccgcaaccgcagcagcgcgaggcgaccgatcgtcctctattaccggcggagcacaatgcgctcaaacagctggtgaccaaacttgcggcggcaacgggggagcccagcaaacagatctggcaatcgatgctggaactttccggggtgaaagatggcgagttaattccagcgaaactgtttaaccatctggtgacctggctgcaggcgcgtcagacgctaagccagcaaaatacgccgacgctggaatcactacaaatgacgctaaaacaacctttagatgccagtgaactggcggcgttatcggcatatatccagcaaaaatatggcctttctgcgcaatcatcgctttcttctgcccaggccgaggatattcttaatcagctttatcaacggcgggttaaagggattgatccgcgtgatatgcaaccgctgcttaatccttttccaccgatgatggacacgttgcaaaatatggcaacgcgtcccgcgctgtggatactgttagtcgcgattatcctgatgctggtctggctggttcgttaaccccgacgaaacgacagtatcgtgacaataattcccagcaccgcagagatcgccccggcaagaaataccgaagagtaaccaaacgtggtcgccagcattcccgcaagcggcccggagacgccgagggcgatatcctgaaacgcggcgtaaccgcccagtgcggtgccgcgaacttgtgaggggacgcgtttaaccacctccacgcccagcgcaggaaagataagcgaacatccggctccggttaacgccgcgcccgctaatgcgacccacgcccctggggcttgccagagcagcaacaagcccaccgtttctacaagcagagagacaatcgccactttcacgccgccaaaacggtccggcatccagccaaacatgacgcgcatcacgacaaatgcgccgccaaacgcggtaagagtaaagcccgccatcgcccatcctttgctggcaaagtagagcgaaacgaaagtcccgataaccgcaaaaccaacgccttgtagtgccagacctaaccctggtttccagataagtccgacaacgctccacagagatggacgttctcccgctagggctggtactttgcgcactgtgccgttacaggcccacgccagtaagggtaatgccattgtggtgagcgccagtgcggcaaaaccgtaatggctatgaatcaacaggccaagcggagcaccaacagcgagggcaccgtaaatcgccattccattccatgacatcactttgccagagtgttttggccctacgatgcctaacccccaggtcagagcgcctgtcagtaactggctttcaccaaacccaagaatcaaacgcccgatgaccaacagggcaaatttgaacggtgcggagacaggcaaaatcgccgccagcagcaacgcgccgccagccagaccacaagctaacatcccntgaagcgccgaacgttttgcgccatattgatcggccagtcgcccggcatagccacgcgtcagcaccgtagccagaaactgaatgccgacggcaatgccgaccatggtattgccatagcccagatcatgatgaacaaacaacgggataaccggcaacggcaaccntacggtcatgtaggtgagaaaaaccgcaaaagcgatgcggaagagcgaaaaattggcagaagatcgtgtttcggtttggcttacagcagtcatgcattactccagaatgcagcgcaaggcgaggagtatccccgtctcatctctctggtttcagggttacagtgcgttggcaggatttaacgcgtacgtcttttcagaaggaaatcgacaaagcggggagtttgcctggaactggcggcgattgtcaatgatgtgaaaaagggaaccatcaggttcccttttgcgttagtgccggaggccgcattggcgcgtaacgtcggatgcgacgctggcgcgtcttatccgacctactccggcctactgcgaattaatctttcagcttgcgcattaccagcgtggcgttggtgccgccgaagccgaagctgttagacataacagtggtcagttcgcgatcggtcgtttcggtcacgatgttcagacccgcagcctgctcgtccagctcttcaatgttgatgctcggggcgataaagccgtgttccagcatcagcagagagtagatagcttcctgtacgccagcagcgcccagagagtgaccggtcatggctttggttgcagaaatcgccgggctcttatcgncgaacacttcacggatagctgccagctctttcacgtcgccaaccggagtcgaagtgccgtgggagttcaggtaatcgattggggtatcaacgccatgcatcgccatctgcatacaacgtactgcgccttcgccagagggagcaaccatgtctgcgccatcagacgttgcgccgtagccaacgatttcagcatagatgtgagcaccacgcgccagcgcgtgttccagctcttcaaccaccaccataccgccgccgccagcgataacgaaaccgtcacggtgagcatcgtaagtacgggaggctttttccggggtgtcgttgtatttagtagacagcgcacccattgcgtcgaattcgcaagccatttcccagcacagctcttcgccgccgccagcaaacacgatgtcctgtttgcccagttggatctgctctactgcgttaccgatacagtgtgcggaagtcgcacacgcggagctgatggagtagttaacgccatgaattttaaacggcgtggcgaggcaggcagaaacgccggatgccatcgctttggtgaccacatacnggccaaccgctttcaggcnnnnnnnnncnngcattgcgtcagcgccgaacacctggaaacgcggggaaccgccgccagaacctgcaatcaggccaacacgaggattattctggtaagcttccggagagaggcccgcatctgcgattgcctgctccatagaaaggaatgcataaatggatgcgtcgctcataaagcgcacaactttgcggtcaatgaggccagtggtatccagttttacgttgccccagacgtggctacgcatgccggaatccttcagctcctgagagaaagtgatccctgaacgtccttcacgcagagatgccaggacttcctgctggttattaccgatgctggaaacaatgcccaggccagtaatcactgcacgtttcattcaatacctctgtaagtcgcacatagagtaagtttcgaatgcacaatagcgtacacttgtacgccgaacaagtccgatcagccaattaatagagaaatttgcgcagccttacacacatcgctaagatcgagctaccgcctgtaagacgagtaacttacgtgaaacactactccatacaacctgccaacctcgaatttaatgctgagggtacacctgtttcccgagattttgacgatgtctatttttccaacgataacgggctggaagagacgcgttatgtttttctgggaggtaaccaattagaggcacgctttcctgaacatccacatcctctgtttgtggtagcagagagcggcttcggcaccggattaaacttcctgacgctatggcaggcatttgatcagtttcgcgaagcgcatccgcaagcgcaattacaacgcttacatttcattagttttgagaaatttcccctcacccgtgcggatttagccttagcgcatcaacactggccggaactggctccgtgggcagaacaacttcaggcgcagtggccaatgcccttgcccggttgccatcgtttattacttgatgaaggccgcgtgacgctggatttatggtttggcgatattaatgaactgatcagccaactggacgattctctaaatcaaaaagtagatgcctggtttctggacggctttgcgccagcgaaaaacccggatatgtggacgcaaaatctgtttaacgccatggcaaggttggcgcgtccaggcggcacgctggcgacatttacgtctgccggttttgtccgccgcggtttgcaggaagccggattcacgatgcaaaaacgtaagggctttggacgcaaacgggaaatgctttgtggggtgatggaacagacattaccactcccctgctccacgccgtggtttaatcgtacgggcagcagcaaacgggaagtagcgattatcggcggtggtattgccagcgcattgttgtcgctggcgctattgcgtcgcggctggcaagtaacgctttattgcgcggatgaagcccccgcgctgggtgcttccggcaatcgccagggggcgttgtatccgttattaagcaaacacgatgaggcgctaaaccgctttttctctaatgggtttacttttgctcgtcgactttatgattcattacccgttaaatttgatcatgactggtgcggcgtcacgcagttaggctgggatgagaaaagccagcataaaatcgcacagatgttgtcaatggatttacccgaagaactggctgtagccgttgaggcaaatgcggttgaacaaattacgggcgttacgacaaattgcagcggtattacttatccgcaaggtggctggctgtgtccggcagaactgacccgtaatgtgctggaactggcgcaacagcagggtttgcagatttattatcaatatcagttacaggatttatcccgtaaggatgactgttggttgttgacgtttgcaggagatcagcaagcgacacacagtgtagtggtactggcgaacgggcatcaaatcagccgtttcagccaaacatcgtctctgccagtgtattcggttgccggtcaggtcagccatattccgacgacacccgaactggcaaaactgaaacaggtgctgtgctatgacggttatctcacgccgcaaaatccggcgaatcagcaccattgtattggtgccagttatcatcgcggcagcgaagagacggcgtacagtgaagacaatcagcagcagaatcgccagcgattgattgattgtttcccacacgcacaatgggcgaagacggttgatgtcagtaaaaaagaggcgcgctgcggtgtgcgttgtgccacccgcgatcatctgccaatggtaggtaatgttcccgattatgaggcaacactcgtggaatatgcgtcgctggcggagcagaaagataaggcggtaagcgcgccggtttttgacgatctctttatgtttgctgctttaggttcgcgcggtttgtgttctgccccgctgtgtgccgagattctggcggcgcagatgagcgacgaaccgattccgatggatgccagtacgctggcggcgttaaatccgaatcggttatgggtgcggaaattgttgaaaggtaaagcggttaaggccgggtaatctgctctcgcagtgtttgccggatgcggcgtgaacgccttatccgacctacgtgtgacgtgtaggcctgataagacgcgataagcgtcgcatcaggcatggtgctccagacgccgcaacttactgctgtgacgcctgctgaaacaggttttcccacatatcggtcaccagcgcctggtcacgcggcgacaattcaccagcaccaatggctttttccagactctggctaacggtcgtatgcaccgcctgagcggagtggtcatcaccactttccagttctgcgatggctaatgtaaggtggccacgcaaatacccactggcaaacaactcatcatcactggcatggtcaaccataccgtcgattaatgccagaatgcgtgattcaaactccgcgatcatcttctttcctcattgtaaaacgtggcgctggcttcagttgagcgcttccggccacgggaactgttccgccgtaagttccggcgtgtgataataattttgtagtgctttaatgaaacgtgccgggcgttccggaatgccatttgttagataatccatcacctgcgcatgtactcgccgttgaaacaccacgcggtccggttcgaagtcgccttccagattgtcgcaactgacgttaaacgggtatcccgccgccacgcagaacaaccagtcgagcgcctgcggcttcacttcaacatcttcaaactggctttgcgtttgggcatcgcgaccgtccgggcaataccagtagccgaaatcaacctgctcgcggcgcgctttcccggcaatacaccagtgcgaaatctcatgaattgcgctggcataaaagccgtgggcaaagacgattcggttatacggtacttccgcatcagcgggaagatagatcggttcgtcgtcgcctttaatcagacgggtattaaaatcatcggcaaagcagctattaaaaatttcaatcaactgctcatagtggtgtgtactgttcattagttcatccccaaccagtggaggatctcctgtccgtggctatcataaagtaatttggcactcatcaccgccgagacgataacgatcatcgggcggatcagtttttgtcctttgctcaacaccagtcttgaacccatgcgcgcgccaaggaactgccccaccagcatcacaaagcccgtcgcccaaatcactttgccgccgagaataaacagcagtaaaccgccgatgtttgacgttgcgttgagtaatttggcgtgagccgtggctttggcgaggttgaatccgcacagcgtaacaaaggccagcgcgtaaaacgatccggctgccggaccaaagaatccgtcataaaaaccgacgcagccaccggcaattaacgcgaagggcaaaccgtacatccggcgctggcgatcttcttcacccagctttggcatcagcaagaaatagaggccgatacaaatcaccagaatgggcaaaatctgccgtaagacatcagcctgaacgtactgtaccaacagtgcgccgctcattgagccgacaaaggtcatggcaatattaagtttctgatcgcttaaactaaccactttgcggcgaataaagtagatagtggcggaaatagagccgccgcaggcttgcagtttattggttgccagagcattagcgggagacatccccgctgccatcaatgccggaatggtgagtaacccaccgccaccggcaatcgagtcgataaatcccgccagcatggcgacaaaaaagagaactcccagcaacagcggggaaaccataaacaggctattaaacgtttccattagatcacgtgctcatccagtagcgcctggcaggaaggcggcaacggangcggtgtcttcttctcaggctttgttgttcccggttttggaggttcaaaccagctttgcagttctgccccgcaaccatcgcctggtggcggtaaaggttgatcttcacactccagactatcggcaggacaacgtaatcgtacatgcatatgcgcacgatgctggaaccagggtcgcactttgcgcaaccagtcgcgatcggtgcccgcatcaaggcaaagttgttgtttaatcgccggattaacaaaaatgcgcgtgacgtctttgtcctgggcggcgagtttgatcaagctgaaaatttctggcttccacagcgtggagacaacgtgtttaccgtcgcgggaaactaagtccagtgcttgcgggcgcaagagctgcgcggaggtccagcgtgttttcggcagttgcagaaagatatcgacatccagtccggtctggtggctggcgtgaccgccgttgaaacgcccaccagcaggcattcccatatcgccaatcaacaccgtacccatgcccagattgctcacctgactactcaggcgctggataaacatcaccaggtccgggtgaccgaaatagcgacgctgatcggtacgcatgacctgataatgttcggactgtatcggcaacgtgtcancgccgacgatacaaccattggaaaaactgcctatcgattgtgcgctacccggcacaggttgggttattttttgccacggcgtcgctgccaggctgacgctactggcaagcagggccagcagcgcaatcgcggttttgttcattttttaccagcgtggaatatcagtcttcacatcngcattttgcgcccgctgccgtaacaggtgatccattaaaacgatcgccagcatcgcttctgctatcggcaccgcgcggatcccgacacagggatcgtgacggcctttggtgatcatctcaacttcttcgccaaagcggttaatggtgcgccccggcacggtaatactggaggtcggtttcagtgccatatgagcaatgatttgctgcccgctgctaattccgccgagaatgccgcccgcatggttactctggaaaccgtctttggtgatttcgtcgcggttctggctgccacgcagcgccaccacgtcaaaaccatcaccaatttccacgcctttcaccgcgttaatgctcattagcgcatgggcgatgtcggcatccaggcgatcaaagaccggctcaccaagcccggcaggaacgccactggcaacaacggtgactttcgcgccaatagagtcgccctcttttttcagcgcnngcatcagttcatctaacgcgtcgattttgtccgggtccgggcagaagaatggattttgctcgacctgcgaccagtctttgatttccagcggaatgtcgcccatctgggtcaggcagccgcgaatttcgatgccaaatttntcagcgagatattttttggcaatcgcccctgctgcaacgcgcatggcggtttcacgggcggaagaacgtccaccgccgcgataatcgcgcagaccgtatttttgttcgtaggtgtaatcggcatggccaggacggaaaacgtccttaatcgcactataatcctgagaacgctgatcggtattttcgatcaacaaaccaatgctggtgccggtagtaacaccttcaaaaacaccggagagaattttgacctgatctggctcacgacgctgggtggtatagcgcgatgtccctgggcgacgacggtcgaggtcatgttgcaggtccgcttccgtcagcggaatgcctggcggaacaccatcgacgatgcagccgagcgccagcccgtgcgattcgccgaaggtggttacgcgaaagagttgtccaattgtgtttccagccatcacggctccgttattgttgtgtttgcgtgtttacttaatctttataaatcgcgaaatgttcacgggccgccagcagctgcgctttggtgagcataaacacaccatcgccgccgttatcaaactccagccaggtgaacggaacatcgggatattgttccataagatgtaccatgctgttgccgacttcacaaatcagtacgccatcatcagcaagataatctgccgcgtttccgagaatgcgacgcgtcagtttcaggccgtcggtgccagatgccaggcccagttccggctcgtggcggtattcatttggcaggtcggacatatcttccgcatcgacatacggcgggttagtgacaatcaggtcgtactgcactttcggcaaatcacggaacagatcggaacgaatcggtatgacgttgtggatcagaccgtgttcttcgatgttctgttcggcaaccgccagcgcgtcgggagagatatctaccgcatcgacttccgcttccgggaaggcataagcacaggcaatggcgatgcagccgctaccggtacacatatctaaaatatgctgcggttgcttgctgataagtccggcaaatttattgttgatcaattcaccaatcggcgagcgcggcaccagcacgcgttcatcgacgtaaaattcatggccgcagaaccacgctttgttggtcaggtaagctaccggaatgcgttcgttgacgcggcggatcacgcgctcaacaatacgatgtttttcgctggaggtcagacgcgcggtgcgcatatcttccggaatatccagcggcaggtagagcgacggcaataccagctgtacggcttcatcccacgggttatcggtgccgtgaccgtaccagatatttgccgcgctgaagcggctcaccgaccagcgcaacatgtcctgaatggtttgcagctcatttactgcttcatcaacgaaaattttatccacgtattcctccagggcatgatcgcaataatttcggcggctagtttgccatgaagatgacgataaatcagcattcacgcgcggtgagtgaggaaaaatacgtttaaaacgatcgattgcgctacgagtcgggtaaactgtaggaaaattagaaatagagacagataaatgaaaaagaaaacaacacttagcgaggaggaccaggctctgtttcgccagttgatggcggggantcgcaagattaagcaggacaccattgtccatcggccacagcgtaaaaaagtcagcgaagtgcccgtcaaacggttgattcaggagcaggttgacgccagtcactatttctctgacgaatttcaaccgttattaaatgctgatggcccggtgaagtatgtacgccctggtgtagaccattttgaggcgaaaaagctgcgccgcggcgattattcgccggaattgtttttggatttacacggtctgacgcagctgcaggccaagcaggaactgggcgcgttgatcgccgcctgtcgccgcgaacatgtgttttgcgcctgcgtgatgcatggtcacgggaaacatatattgaagcaacaaacaccgctgtggctggcacaacatccgcatgtcatggcgtttcaccaggcaccaaaagagtatggtggtgatgccgcattgctggtgttgattgaagtggaagagtggctaccgccggagttgccatgaatattagggggnggatgcgttttgccatttcgccctgaatgctggtatcgaatgccggatgcggcgtaaacgcctgatccggcttatcaaaatgtgcaaattcaatacgttgtgattcagttgtaggcatgataagacgcgtcagcgtcgcatcaggcatcaacgcacaactacagttcattcagtacatactggaaacggcatgtagaatcaattggctcacggctactggtattcacctgtaccacaatgtcgtgtagctttctatccgtcaatggttgacgtgagggggtgactgtcacctttgcattatcacaaccatacgaggtaaaggttaataagtcagaaacagcacgacaatatgcccctctggaatcaaaaatactgccatcgcagagtttgccgctttccatcaggtaggtcgaaagcgtagtcgtgattgtcgaaccatcggattgcaatcgcagcgctttattatggctaacataattatcactccaggatatatcaaacgaagcgacgggaattgtcgggcaaatagaatcatgaactgttgggcttgtatacgtaccaaatccaaatgcctcagatactgaataaaatgaggcaatccacggacaaccataattatcagattctacagtgacgttaaaagtcatatatgcacagacaaagacacgagtattgataccagggcaatttgaggtgtccgtacgtctataatcagtcaaaaccagtgtcggtgccgggccagatccgctccaggatattaacttgagggtgtcgccttttcttgcattggagttgtattgtccgtagcttacttctcccggcgtcactaccgtgacatagaaatataaactgccggaagcagtaacgtttttcatcgcataataaattttagtactggaaaagcttgcactcatgagtttatcaccggcatagcactttggtgtttctaaactgagagcaagtaatatcagacttgtcaaaaatatcgtccattttttcattttaaaaatactcaaaagttaccgtcattgtggcggtgaaatcacccgatgtaacatttcgtccatttacggtctgtaaccaggcattaaaattgacactgttatttccctgatttaatggaaatgaggcacctgtggtactgttaataggtacagccgcccctccggcagtttcaatgccaatcccaacacccgttgcagaagatgacgaatcaatcgacagaaatcctggtaagtcggtatcttctgttcccatcaaggtcaccttgacattaaacgccgtggtgcttttgcaatctttcaactgaaaaactaacggtacgcgatctgactgaccacgttgcattaaatcgctggcagcaattgtggggaaatgaatttctgcaagtaagttgccattgattacaggagtacaggatttaccaagcaaattaccggtaaaatgcaggttatcggcagctggggccgttccgctgaacaatatcagaccactgataagcgcccacgcacggttattcttcattggtaatccacctgtaacgtagcccatgcttcaaagtctgactcgggtaagtcgacaccgctcttttttacgggtactgccgttagtaccggaagggatgtttcattcaccactaagggcgtatgcagcttaaaatcgctcccggcttgtttgaggtgtattcctaatccattgatatccgtggctacggccgaatcgtcaaagtcactctgcgtaccactccaggtcaacgtcatttccatttgagggtcacggacagcggtatcgcaggtaatggtatacggcacgacctgttcgtaattgctaccgttaatgtcatcaatattcacgtcccgaaacgtcaactctatattttgcccattactaatagagcaattgggtggctgcactaaataaccatgaaaagagacattcgagagcgccataaagctaaagctccacaacattaagagagagatccgtttcattgataatccaccacaattgtggcactggcgctaaattccgccgccgttagcgatacaccgctctgcacgacaggaaccgcttccagagccagtgcgccagatgaaaagttaaacggtaaccatgcgccaggcgttaaatccaaaatggagtgatcgcttactttctgaatacggataccaaaaccggcaatacccgtatcgattaccgtttctccgttaattacggttgtggttgcctgcatatttaagcgcaggtcgtccattgccagattgttgcacacaagcgagtagtcaatggggcgtttgtaacttaccccatcgatcttggaaatgaagacattaccgaactccacgctcgcacccgttaccgtacagggcggcggggcatcaacgagcacacgcaagaccatcgcaaccgatttactccccgccattacaggcgtgctcacaatgctacacagcaataaccacgcccaggccgaataagctcctttcatgctattgctcctatccctggcctttgctgttttgctcttcgtccacctgacaggtatttcccgtacagcggaagaacagcggcaaacgcgcaccataatcattcacataggtcagcaccgggacgctatccattttgacttttaacggcacagaggtttttggcgatatcaccatgggggaaaatcccgctgccggattgccatttttctgcgcactggcgttactgataaccacgaagtacggcgtcgggttattgacggtaaactcctgaccgctgcgggttaaggtcaccttatgctgccacgggtttttcatgctgacgttttccagcgcctttggtcgccagaacaacttaatgcgcgtctgcagcgctatctgtagcgtgttaggtttgttcgatttcggcgggatctcacgcacgttgaaatagaacacgctctcgcggtcggcaggcagcttgttgatatccggcatgccctgtaccttcacctgaccgttcatcatggaatcgatgcgctgcactggcggcaggaccgtcagtggcgagctaatcctgttaccctgtccatcttccatccagctttgtgccagatacggcattttcgggtcgttattgcgcagcgtgacgctgattgatttatcactttcgttaaaaatcaggcgtgtacggtccggcgtgacagaggcctgtactgacaggctggcggcagttatcagtaacgccagcgtcgttgcggccgttctggcagancaaaatagattcgtcatggatcattccttaatcacgttattaattggctgataccgatactggcgcttccgttggcatcacctgctgggtctgctcctggatcaccggcttaatttcatgaggcatcgaaggagatatcgcccctgtttgctggcatggtaataacaggccattgaacagatcggctggcagcgggtcaggcagatgaatatcgcagtgggccacaccgccccatgaaacgatcatatgctcgccaggttttacgcccgcgaggtagacgttgccgtcatcgtcaaccagaccgacgttctgcgcgctgtcgtttttcacttccgcgccaaacggcggataactgccatcttgcagacgcagcaccgccatcgctttttgcccgctgatcaccgagaacttacggtagccaatggccccttcggtaagcgtggcctgcaccacggactgggtggcttcggcgttttccggcaagttgtttaggtcgatatacgcctggttgcggtagtagttgttgacgtctgccaccactgccttaccgaacatattggtgtaaaccgccgcgccatttccttccaccggaacaccagccacaccgtcggcatcaatcagcagacgcgtaccgcccatattctgggtacggtggagcgcgccnnnnngtgcggtgancgtcgcgccgccctgtaaggaaatacccgccgaggtgtactgcccttcatggtagttagcgctgagatcgacctgcgccagcgatccgtcgtggctgtaataaccgtcaacgctggagtgattgtcgctggtgcctacgttcaactggtaatgggttgcgtcatcgacacggctgaaataccccacctggctgctgtccgaaccgctgccgtagttgccgttatagctgatggtgctgctgtcaccccacggcatantgagcgatatgtacacacctttatcggcctggttgtcatactcgtagcggtatccggtcatggaaatgctcatgttgcggatactgcccaggttgaagtagtgcgagagcatgacgttgtagttggtctgttcgtcgcgatcccagtaggtatggccggtgtagttgagataaacagacacaccggcatccctgaagttctggttataggtggcggtgtacatctctttgtcgttgccggtgcgcaccatttcgctgtcgctggcatcgagatactcgctcatggtcatgaagttctcttccgagaagcggtatccggcaaaagtgacgcggctgttcagttcatcgaagtctttggaatagctcaggcgaaacgagttgccgtccagtgaacctttcccgtaggcggtctctttatccagacgggtatgcgagtgggtgatatcaaaggccaccgcaccaaacacagacaggtcgcgaccgacgccaagcgccgccgactgatagtgttcatctgccagcgccccgccgtatagcgaccagccgttggcaatcccccaggaagcttcgccgccggagaagaaaccgccttccacgtggtgcccccactcctgcgggcggcccatcatcagtttatagcgcacctggccggggcgagtcaggaacggcatcgaggcggtgttgatgtcatattcctgcacctgaccgttctgttcttcaatgcggatatgcagcgtaccggagaccgaatcgccaagatcctggatgcggaacggccccgccgggacctgggtttcgtagatgacgcggcccaactggctgacggtcactttcgcggtggtgtgcgccacaccggagatatccggcgcatagccgcgcagattcggcggcaacatttgatcgtcggtgctgatactgccacccacgtagttaaagccgtcgaaaatatcagaattcaggtagtcttcgccaaggccaagtttggcttttagcgacggtaaggctcgccaggcgtagtagcggctccactcccagtttttttgcgtgtcatcaccgttgataacatcgtcatcattgcttttactatgcaaataatcagtctgccagtcggcacgaagacgccatgcgccgangttcaccccaaccgtcccgttaccgctaatttcattgctgtcatccccgccattttcttcatgtcgtgtctgggcggtaatactgtagtcagcaattaaaccagatataccgtcatcccagcgtgaaggcggatcccagttgatgtcggtatattcaaggtaagcctggggtaatgaaatgactaacgctgactgactcaggtcagctttaatatcaatgccttccagttgaccgggtttcaggcatttgccgtcgtggatccattgcaggttttttgccacatcctcttttaagccaaactgcgcgaccagttcaggcgtcaggcaggcataggttttactggcatcgttctcagaggcgtaccagtaaatatcgtattcttccgtcagcggctgtttatttagttgaacctgtaaattgtatttcccaggttcgacataaccctggctggaaaatcgcttcagatcgatttttgtgtcgccttttaactccagaaaacgggaatcaaactgaatttcattttcagcccaggcattgacataactcccggacattgccaatgcaacgcagcagggaagtacccgcagtcggaaaaganaatggtcaggcatacacgtatccatccgtaattattataatttgcgcgaattccatttaaaaaccccatagcccgaaagctatgggggtatcacttagagataagtaatctggaaggtcgtgttggcttcaaaattacctaaatctggcgcatcagcagcgcccaccagccaggctttaaagtccagcgtctgcttcgctttgcctttgttggtcgccgtatcgtttacgattttctgttcgatacccgcgccgcttttataagaggttccctgagcgtcaccaatggccaggctgacattgttaaatgccgcaccagtatcggtattgtaaatggtgtagtaattgccgctgttggtagaagacgcgttaccggtgaaggtagtggtcatcgttgtctgggtgtcaaacacacagtcttgcagatggatctggaaagctttcggtgtagaagtcccgttatttttcaggatccctgaaccaatgtcacccatatcaacttccagtttgtgatcatcaggaacgatggagcacggggaatcttcaatggtgccgtagaaacgtgctgtaccattgttgccagcggcgattgttgaagtagaagcgaacgcacccattaccattgttgcagcaatagctgtttttacaaacttactcattatttgtccttaaaccataaataattaaaaatataaacattgcaatacattgattcagtcaatagcaattatttatacccagccattgaataagctatccgatctaactaacaagaaaataggtcgcataagaagatattctttggtgtgggcggatggtgatattttgtctttattgtttcaaattatatttacttaacagcgaattaaggaccgcttaatgtatagccagaatagaaatattttgaggattttcttataaaaaagaaatgaaatgcttaaaaaaatatcttacacataatttcaatttatgaataacctgcgcaaaaaagacaatcttagattaagtttgagattgtacttttttgaagttatactattaacacatcacaaataatattaaattaagacacaaaaatatcatttcttttttattattaactgttctattagtttgatgctttgtaaaaatacattacaacttagtctcatttcgtcagaaattaatagggaagcagaggaaaaagtgcgatgaattctgtatcgaagcgtatcaactccgttaagggttttgagtgaatttctactattgcaaaaagacaaatgcccgatgtacagcttacatcgggcattttttcaaacgaatcagatagctttcgccatcttcaaattacatgggctcatctgccagttgaactcgccttttccgctttcatcaagcgttacgctggcaatggccgaggtggtaaacataggcggcgtttcgcccggacataactcggcgaccagatacccaactaacggtaagtgggagataaccaacaccgaagcaacaccttcattggtcaacgcctgcaaataggcactgaccagaccaacatcgccgcagggcgttaactccggcagaacttctgcactggaaggcaggttcagacaatccccaacttcctccagtgtttgctcggctcgcaggaacgggctcaccagaacgcgttcgatttccactttttgacctttcagccagttcgccatcaggcgagattcgtcacaaccgttagtggtcagaggacgaaccgaatcactggcggcatcgagggctgcgtcgccgtgacgcatgataaaaacttgcatattgcaccgcttttgttaaccagattcgcccgttttctttcatctgaaaccagagaaagaaaacggtggccggcattgtgccttatccattcaccgaatgaaacgctgttttttacctcaatggcgtaagtatagtcaatatgcgtttacattttgaccaacaatccgccattcagcgcggattcatatagctttgaccttcttattgcaggtcagttgcagttgttttccaaaaactttccccacgcgcacccatctcgactaaacgctcgcaaggggtaaaacgtgaaccatactgcgtggccagtcgttgcattattgcaaccacttcgcccgcgccgagagaatcgatatagcgaaacggtccaccgagaaatggcggaaaaccaatgccaaataccgcaccaatatccccgtcacgcacgctacggataacctgctcatcaacacaacgtactgcttcattcagcatcaacatcacacaccgttcagcaacctgcggtgcggagagtcgcccctgcccttgtgcgccaatgagcgggtaaatggcaggatcgacctgttttttgcttttacgccctttctgaccataaagatagaaacctcgaccattttttctgcctttgcgatcgtcgttcaaaattgaagaaacaacatttgcaggcgcgctaaaacgttctccataagcggcttccagtacaggaataattttagtcccggtgtcgattcctacctcatccaaaagttggattggacctaccggaaaaccaaatttcactagcgcggcatcaatgtgcgctacccgttcaccttcggtcagcatgcggatagcttcattaatgtaaggcgctaagatgcgattgacgtaaaacccggctttgtcacgcacgacaatgggcgttttgccctgttttttcgccagttttaccgtagtggcgatggtttgcgctgatgtacccgcatgaggaataatctccaccagcggtattttttccaccggactgaagaaatgcaggccgataacttgctcaggtcgcgtggcgtgagcggcgatatcaccaatcggtaaagatgacgtattcgaagcaaagatggtatgagcggcgcaattttgctcaacttccgccaccatctgttgtttcaattcgagattttcaaacaccgcttcaataatcagatcgcgatgggcaaagccgcgatagtccgtcgttccggagattaatgccagctgtttgtcacgttcgctggctttgagatgacgacggcgaactttgccctccagctgatcccaactgtacttcagcgcatgatttatgccctgcgggttgatatctttaattctgaccggaatccccgctttacaagcagtgacataagcaataccgccgcccatcaagccaccacctaaaatccccacgctgtttaatggcgcaggcggcgcatcactgccgggatctttcttcacttccgtactggcaaaaaagatactacgcaaagcttgcgattgtggcgtcatcgccagttcgccaaacgcccgtgcttcagcgtcatagccactgctggtgccctgcgctaatcccgtttcaacaacctccaggatgcgttctgtcgccggataattgccttgagttttgtgttctgttttcttgccgaccattttgaacagcagcgcacgacctaacggccccgccagaatacgctcgcgtacaggtagagggcgggaagatgggcgatccttctttgccagctcaacagcggcttccagcagaatggagtgcggaacaacatcatccaccagccccagctttaatgcctgtttcgcccgaagttgttttccggtgaggatcatctctaatgctgtgctgacgcctatcagacgcggtaaacgctgggtgccgcctgaaccgggtaacaatccaagttgtacttcaggcaaaccgagcaccgttttaggatcgtcagtacaaacgcgaccgtggcacgccagcgccaactccagcccaccacccaggcaagcgccatgaatagccgcgataaccggaatgggcaaagcatgaatctccgccatcaactgttggccctgccgcgccagagcttccgcttcttgcgccgttttgcaattgccgatcatgttgatgtctgcgccagcaatgaagttgtccggtttagcggagacaaacaccacgcctcgcaactctttgttttcacggagttgcttaataatggcgcgcacctgcgaggcaaactccgccttcagggtattcattttctcacccggtacgtcgatggtgatgatagcaatgttgtccagacgaacattaagagtaaacgctgatgtcatttccattattccgcctccagaaccattgccgcgccaagcccaccggcagcacaggcggtaactaaaccaaatccaccgccncgacggcgaagttcatgcaatgtctgggtaatcatccgcgcgccggtcgccgcgaagggatgcccgtaagcaatcgaaccgccaagcacgttaaatttgctatcgtccacttcgccagtggcatgtgcacgccccagtgcttcacgagcaaaacgttcactacccagtagctgaatattggccaacgtctgggcggcaaaggcttcgtgcatatcaatcaatgtcagatctgccattgtcaaaccggcacgctccagcgccagcggtgttgaccaggctggaccgagcaacatgtcctgccagacatcgatagcggtaaatgcgtagctgcgcagatatcccagcggtaccagccctaattctttcgcccgggattcagtcatcaggatcaccgccgctgcgccatcggtcagcggcgtactgttcgccgccgtnaccgttccgtgtttacgatcaaacgccggacgcagctttgcgaaatcagcaagcgaggaattaccgcgaatattgttgtcttccgcgagcagttgtttataaggagggataaaggcagtcatcacctcttctttgagttttccgtctgaccatgcctgagcggcacgctgatgcgaacggtgcgctaatgcatcttgctgttctcgggtgatgccgtaggttttcgccatttgctctgcagtgtcgcccatccgcaagccggtagaatattctgctaccgcaggtggtacgggcattaagtcgcgcaaacgcaggcgagagaagagtttcagacgctggctcattgtgcgggctttgttgacatcaaccagcacgcgcgccagttttttactgacgccaattggcaataccgaagaggaatctgccccaccggcaatccccgctcggatagtccccgccatcaggctttctacgacgtttgcaaccgcctggaaactggtagcgcaagcgcggctgacgctgtaagcatcggtatgcacattcattccagtaccgagaacaatttcacgcgcaacgttgggagcttcaggcatttgtacgacctgaccaaagaccagttgttcaatcacttcggcggggatctcgctgcgtgccagcagttcgcctaccaccatcttccctaaatcaaccgcgggaatgccatgaaaagccgtcgcctggcgggcaaaaggcgtacgtaaaccgctaacaatggcgatacgatcgccctggcgggtaaccagcggtaaaacctgacccataacactcccctgtaaaaaaataaataaagtggtctgacctgatcatagtcttaaccatttttttacatttagccaagcggagaaaagggaaattgggagctatgacacagtgaagacaggagaaagaaaagaaaacgcccctacctgttgctggcaggagcgtacttatccgagaggaattaacgcagacccagctggaagatcagcatttcagcttcgcaggcaaaagtgaaatcgatatccaggcgcacaccatcagactcttcagtgaaagtcggggagattttgcacggttcggattccacgctacgggctttctcagtcagcgccgccagcgtttgttctgcttctgcgcggtttgcaaacacgcggctgtaagacgctgtgcagtcggagttgtccataatggtgccaacatccatacagcagcaaaccggggtttcatcagcactacatttactcatcgttgatttcctctgtatgtgcacccaaggtgccagataaacgttgtggatattttacgcttccggaaagtgctgctccagttgttaattctgcaaaatcggataagtgaccgaaatcacacttaaaaatgatctaaaacaaaattcacccgaatccatgagtgcgccacctccaaattttgccagctggatcgcgtttcttagatcatatttgaaaaaagatagaaacatacttgcaacattccagctggtccgacctatactctcgccactggtctgatttctaagatgtacctcagaccctacacttcgcgctcctgttacagcacgtaacatagtttgtataaaaataaatcattgaggttatggtcatgagccagaaaaccctgtttacaaagtctgctctcgcagtcgcagtggcacttatctccacccaggcctggtcggcaggctttcagttaaacgaattttcttcctctggcctgggccgggcttattcaggggaaggcgcaattgccgatgatgcaggtaacgtcagccgtaaccccgcattgattaccatgtttgaccgcccgacattttctgcgggtgcggtttatattgacccggatgtaaatatcagcggaacgtctccatctggtcgtagcctgaaagccgataacatcgcgcctacggcatgggttccgaacatgcactttgttgcaccgattaacgaccaatttggttggggcgcttctattacctctaactatggcctggcaacagagtttaacgatacttatgcaggcggctctgtcgggggtacaaccgaccttgaaaccatgaacctgaatttaagcggtgcgtatcgcttaaataatgcatggagctttggtcttggtttcaacgccgtctacgctcgcgcgaaaattgaacgtttcgcaggcgatctggggcagctggttgctggtcagattatgcaatctcctgccgggaagactcctcaagggcaagcattggcagctaccgccaacggtatcgacagtaataccaaaatcgctcatctgaacggcaaccagtggggctttggatggaacgccggtatcctgtatgaactggataaaaataaccgctatgcactgacctaccgttctgaagtgaaaattgacttcaaaggtaactacagcagcgatcttaatcgtgtgtttaataactacggtttgccaattcctaccgccacaggtggcgcaacgcaatcgggttatctgacgctgaacctgcctgaaatgtgggaagtgtcgggttataaccgtgttgatccgcagtgggcgattcactatagcctggcttacaccagctggagtcagttccagcagctgaaagcgacctcaaccagtggcgacacgctgttccagaaacatgaaggctttaaagatgcttaccgcatcgcgttgggtaccacttattactacgatgataactggaccttccgtaccggtatcgcctttgatgacagcccagttccggcacagaatcgttctatctccattccggaccaggaccgtttctggctgagtgcaggtacgacttacgcgtttaataaagatgcttcagtcgacgttggtgtttcttatatgcacggtcagagcgtgaaaattaacgaaggcccataccagttcgagtctgaaggtaaagcctggctgttcggtactaactttaactacgcgttctgataacgcgttcgcctggataaagtcacctgctatgcaggtgactttaactcccccacttcaccgaaagtagtttcctcattgcttgcctcctgagttttgcaaacagcctgatggcagctagccctttcaaatcagtaagtggtatccacagacaaacctgaagggaaacgcatattttcaggcgttctgctcgtccttctcaaagagtttacttttctgaatttccaggatactcaaccccctggctattgtgcgctcatacacgcaaattaaagataggttctaaataaatgagcgttttttgatagtctatttcattaggtaatatatannngtaacaaatcaatcaacatggaataaaatcatgctatcatctatttcaatcaacaataccagcgcagcttacccagaatccatcaatgaaaataacaatgatgaagttaatggattagtacaagagttcaaaagcctttttaatggtaaggaaggaataagcacctgtattaaacatctacttgagcttataaaaaacgccatacgaggaaacgacgatcctgatagaataaatatcaataattcttcagttacttatattaatattggttccaatgatacagaccatattactattggtatcgacaaccaagaaccaataaaattacctgcgagttataaagacaaagaactcgtccgtactatcattaatgacaacatagttgagaagactcatgatgatataaataatgctgaatttactgatggtggtattgatgatcgtagtgatattggcattgactccaatgatacagacgatattgatattgataatcaagaaccaataaaatcacccgcgaacgatgaaaacaaaaaagtcggccaaaccatcatcaatgaaaacatagtagagaatactcatgatatcaataacaagaaaatgatcttcagcgcaataaaagaaatatatgatgaagatccaagttttatcttcgataaaatatcacacaaactcagacatacggtaacggaattcgatgagagcgggaaaagcgaaccaacgggcttatttacctggtacggtaaagataaaaaaggcgactctctcgctattgtaattaaaaataaaaatggaaatgattacttatctctcggttactacgatcaggatggctaccacattcaaaaaggatttcgtattgatggtgataatctcacccaatattgtagtaaaaaagccaggagtgcttctgcgtggtttgaacacagtaaagcaatcattgcagaatcatttgcaacaggttccgatcatcaagttgtaaacgaactcaaaggggaaagactgagagaacttaacgaagcttttaatccttcaaatctagcaagaggatatgaatattaagaggatgatctcaaatatacatttgagaatacaaaagaaatagtttctactttagtcggtaacaaagttaacgttggccattctcaaaaaatatataaacattttaaggatctcgaaggtaaaactgaagaaaggcttcaaaatcgccaggctgaatatcaaaatgaaattaatcaactatatgcgctaggtgttaattttgatgatatttaaaattatttttccatttttttgatttttcaacagctgaatatcggaaatagtcagtgacgaacatcagtatttttacataattacgtccgggtcattgtcggtttatctccttttacttgtggtaattgagggataacaacaaaaaaggtgagttttgcgactcaccttttttatttgtttcttattcagaatcgatatcttttaaatcatcctgaatcgcttgcgcgttcggattttcctgcggtttgagttcgccgccattagcgatgaaatcatgacgctggaagtacgcttcgcgcaccataatataaggatcggacgactgacgcagcagaccgtcggaatccagcagctgtgcgcgggtttcgataccttcaagcgtccatttacccacagacatcggccaggtcagccaggaaagaaccgggtaaagaccatccgccatatcaccaccgtcatcacgcagcgtgaagctaccgtagaacggtaattgaacgtacgggccataacccacgccataatgaccaagcgtactaccgaagcggtgaggttcagtccgttgcagtttcgggttcgccatccctgcaacatcaataaagccgcccatccccaaaatggtgttcaggaaaaagcgggtaaagtggaccatcccctgataagggtcgccctgcaagaagtagttaaccatcaccgcaggttcttcaaggttgccggtaaaattgctcaaaccgttacgcgccggttgcggaacataatcacgccaggcgacagcgaccggtcgaacaatatacgggtctaatacattgaagttaaagttgtacatggtgcggttgaacccttctaacgggtcagaacgcccttgctgatctgtaccggaactcgcacaccccaccagaagcgtagttcccagagcaagcgccgacaggcgaagcttcataaatgtctccctgtttttttatggcttatgcagtttgccatccatgacggaacgataccgtatccgcctgtttaggtgtgggcgattgtaacagcacgtcaactgatgtccagacgccctgatttgctgatttgatcatagcctggtaatcgccgccctgtaggctacttgattctatagaaacagaaaaaggcaaacgcggccttttctacattttcaaagtaactcccgccagttgcgagcaaaaaagccgctacgctttagntatacgtgctaattcaagagaagagaccatggacaacgacaaaattgatcaacacagcgacgaaattgaagttgagagcgaagaaaaagagcgtggcaaaaaaatagaaatagatgaagatcgactcccctcccgggcgatggcaattcatgagcatatccgccaggatggtgaaaaagagctggaacgcgacgcaatggcactactgtggtcagccattgcggcgggtctgtcgatgggcgcttcattactggcaaaagggatatttcatgtcgaactggaaggtgtgccgggcagcttcttgctggagaatctcggttatacctttggttttattatcgtcattatggcccgccagcaattatttaccgaaaacaccgtgactgcggtactacccgtcatgcaaaaaccgacaatgagcaacgttggcttacttatgcggttatggggcgtcgtgctgctgggtaatattctcgggacaggtattgcggcgtgggcatttgaatatatgccaatcttcaatgaagaaactcgcgatgcatttgtcaaaatcggcatggatgtgatgaagaacacccccagcgagatgtttgccaacgcgatcatttccggctggctgatcgccactatggtatggatgtttcctgcagcgggtgcggcaaagattgtggtgattatattgatgacctggcttattgccctgggtgacaccactcacatcgttgtcggttctgttgaaatcctctatctggtgtttaacggtacgctgcactggagcgatttcatctggcccttcgcactacctactttagcggggaacatctgcggcggcacctttatcttcgcgttaatgagtcatgcacagatccgtaacgacatgagcaacaagcgcaaagcagaagcacgccaaaaagcagaacgtgcggaaaacattaagaaaaatgataaaaacccggcataaatggcgagggtttaagcaatcgagcggcagcgtacttaccccgcagtccattagcgggtatactcatgccgcattgtcctcttagttaaatggatataacgagcccctcctaagggctaattgcaggttcgattcctgcaggggacaccatttatcagttcgcctccatccgtaccagtccgcaaaatcccctgaatatcaagccttccgtagattcacagttcgtcatggttcgcgtcagatcgttgacagccgcactccatgacgggtaaaaagtggatannataattttacccaccggatttttacccatgctcaccgttaagcagattgaagcagcaaagccgaaagaaaaaccataccgcctactcgatggtaatggcctgtacctttatgtccctgtatcagggaaaaaggtatggcagcttcgctacaagattgacggtaaggagaaaatcctgaccgtcggaaaatatccgcttatgactttgcaagaggcaagggataaagcatggactgcgaggaaagacatctcggttggcatcgatccggtaaaggcgaaaaaggcttcgtctaacaacaattcctttagtgcgatttacaaggaatggtacgagcataagaggcaagtctggtcagccgcctatgcgactgaacttgcaaaaatgtttgatgacgacattttacctatcatcggcggccttgaaattcaggatattgagccgatgcaactgctggaagtaatccgcagatttgaagatcgcggggcaatggagcgagccaacaaagcacgcagaagatgcggcgaggttttccgttacgctattgtcaccggaagggctaaatataacccggcacctgaccttgctgaagccatgaagggataccgcaagaagaacttcccgtttttacctgccgaccagatcccggcattcaacaaagcacttgcaacattttcaggaagtatcgtatctctcattgcgaccaaagttttacgctacacagcactaagaacgaaagagcttcgttccatgcaatggaagaacgtcgattttgaaaacaggattatcaccatcgaggccagtgtgatgaagggacgcaagattcatgtggttccgatgtcggaccaggttgttgaacttctcactacgctaagctccatcactaaaccagtatcagagtttgtttttgccgggcgcaacgataagaagaagtcaatctgtgagaacgctgtactgcttgtgatcaaacaaatcggctatgaaggtctggaaagcggtcacggattcaggcatgaattcagcacgattatgaacgagcacgaatggcctgctgacgctattgaagtgcaactagcacatgccaacggcggatctgtgcgtgggatttacaaccatgctcagtatctcgataagtgcagagaaatgatgcagtggtgggcggactggcttgatgggaaggtggagtagttattacaacgattcttataaaaaagaaaagccttgcacatatagcaaagcttttcacttctcaggatttcttacaccaagaaaccatcaacaataacaaaatgcaattattatatgttaactacatatgcatttcattaaaaccaatcataaatgcttatcatactttaattgctataattgattgccttctattttttcaactcgagtggttgaaacatcattcttaaatccactccaccattttcttagcttattgtttattggcttttcaaaaaacaaatacatcattattgatataaataatgaagcaaacagagccattactataaatttaattacacttatagcaccaagaccagaaacattaaagaacttgctcaatgtactgattactatagtatggaccaagtaaaatgaaaaagaagcatcacctaaaagtatcataactttatttgatattatttnnnaaataataccaccattaaacgaaaacactaatattgaaaaggccattgatggtataaaaagcgcatcatactgtaatccattgctattttgactttttgccaccatatagacagacattaggataaagactacagatgatatttcagcaaatgatagaactaaatatgacggctttgacttaaactcaaaatctccggcctgattgctgcggattgtctctgccagcctgcctcggtcaatctcacgaccagccatcttgtcctgaacattgaagtagtcaatcggaccgagagcagccatcccaaggtgataaacaaactcaccaaaccctgaaggattctgctgatacatctgagcaacgttgttagggtcaacaccgacgcgcgccagttccttggcgttgttttgcagccatgattgcattgcttctggagacgaggccgcaaggcgtgcgccagccgctaaggtgccgatagaattgcgctggtcttcgtctgcccacttcataccagactgaatcttctctaattgaccaggatatttggtcatcagatctcgaacctgctgtcgatcgccggactggatggctgccgcatattctttttggaatgcagcatccgcttcctgttgctttgcggcttgagatgtttgagcgacactaccaagtccctgcaacgcctgaaggccgatgttattgcgacctgaacgctccatttcgttgttctggcgaatataggccaacgcctcacttacatcacttgcctttggcgcatttgagttttgcccaccgataccagcaagaaaaccgcctgagttgattccttgttgccaagtagccatattcccaccttaaaacaatgatccaagaccaccgataacaccgccagcaagagcaccaataccagtcccaataacaggaactgcactaccaatcattgcacctgatgcggccccaccaatggcacctgtagcaaaactctgtaggcctgaaggcttattcgcatttgctgccgatgctgccgcctgctgttgatacaattggctgacattgttagcgtagttctgtccggcgtttgcctgacctgtaagagcaccaaggccgatatttgccagattgttgtagttgttcatctgacctgacagccagttttgaccgagtgtaggtgcgattgctgctaactggtttcctgttgctgtagagcctaatccacccgttgcctctgctgctgccagactctgatagcgcgcctgccctgcaaggtctttatactgctgagagttgtaatactggttaagcgcctgaccttgcccctgaagagaggaaagattctgcaactgtgatacgtactgctgagcgagtggcgtgaacggtgcaaggttttgcatgttcgtctgccacatttcacgctgcagttcgatgcccttttcagttgcgcgtgcctgggctttagatccggagtcgctgccgcctttcatatacccattcatgggaagcaatttattcttgaagctttcgctaagtactaacatttaatagctcctcatatttcgaacgaggtaattgatagagggtgattcctaccggttttccgttactcatgtacgcatcatcaaggtgaccaacacgggtagcgccaagcaaacggataattgcccgtccgtatttggtggtgtcaggaaccatggtgatgctgttaaggaatggtgagttttcgagaagccatttgcagaataatcgatgccattgtagtgcatattcgccacggaatccggggtcatacaccgcatggcattcaacaacgctatgccagaagttacgcacttcatgaactccagccagcactaatccttcgtagatgccgagatataccgcatcaggcttgatgtagtatttatctccactgtctacgatattccccgtgtttaccgggttgttaaggaattctgcaagtttcaccgggttatcgatgagctttatttccatcactgctccgcaatgattttgatggttgtggcagtaaacgccgcgccattcgactgaatggttancgtgctgccatttgtggcaagaaagccgtctttatccacgctgaagaacgtagctaacaggatgttgtcggttgttgttgccgagttgcgactgcttactagcgtgtcaggaacagaaccggagaatgttagctgcattgacctgttggcggttccgctgggccacgtcccgacaatcgacagcttgaagaacaaggttttgttctcgttgaacacaaccatcttgttgttaacggtgtcgaagaatggtgccaacgtcccggatgacggcgtaagcgttttcagcaggctaacaaggttggtcggcgctgtcgggatggttactgatacgccagagtaaacaacctctgacttcttgcgcgtagtggcatactccagagcattaatgcgcgtttcatggtctgaaacctgcgattccagcgactgaactctggtatcaagcgatgcaatatcgctttcattcaaggcaatcagtgggtttacgtcatggagtgggctcaacaccagtcagagccgcatgtacacgcaataatcatggtgaacgaaagaagcattaatgggcaagctggcaaaattgtcagcaaatgggtaacactggcaaacaatgcaatcccatcaaatgttcctccccagtgggatctagatttgaaaggtcagcaatattcagagcctacaaagtgtataggtaaacagattgattacatggcaaagcccgaaactaagttaaatgactttaatagagaggcgagcaagagcctatatgattggtcagatgccaacgtttggggttattcgaatggctgggcgcggcatgagataaaaaaagaaacactttctatcactggctttcatgctgtaagacgcatactaaaagccgttcaggcatcaaggaaagacaactacaaagctaagcgacagatacagcgtacattgaaacgacaagacataaatcgatcaccaatcaccccgttccaagcaccgttaattagcaaacacgattgggatttatcagtgatagcggtcaccaaagaggcagagacagagcgcagggaattactatcctcacagataataaactcgaacaaagtacaaacccacccactgttaaggatgttaagaagagcacgagtgagagcatccagagccaaaagagaaagcggaggttatgaccattactactagtagtgacagatcgtgacaaggcggtgcaaaaaacgaccaataataagagagatatgcctgccaaaccgccaaaagcgcggagcgcggcaaacgccgcgagaggcgcaagaaggcgaacctatccattgaaacggtcagaagcgcatcgcgctcgacgaccgaagtccccactaacaccgttaacgaaagatcaaagtcttagaaaaaaatgacgtttctttgatggacttccatccgtaaaaatcaaattttgagaaaaagtacttatagaaattaatcgctctataaggataagttgacgttagtttaaagtgataaaacattaaagaaaaaacgtaaaatcaaatacataaaataagtcaccaagggatcattttcagaaaacaacgtcaacgtaacgtcaactctgtaagaacttttttggtcactttttgggttgaatgtacgtaaaaatccccagcagtgaaatttgagcgcgtaagcacaattctgaggggctttttgtctgtaggttaggcagtgtaactaacaatacaagaagttagctctgactaactatttaattaacttttcaatctaattgcgttagatattataccctaacgcaatatttttaattcaataatgtctgtaaattgttattacttataattatacatttaactatatctacattggctgcttccaattactacttacgtaacggaatctcggatcctctgtttttggctcggtataataagaatcatcaatagtaaagttcgacgctaatttatcccgaagcccacctaaacgttcaatgcttgttagttcgttagtaacatccttgaaaacggtagaaaatgctttatgttgtttagacttcataaattcaggagtgctcagtgcaaactctttatcaggcaaacctggaatacccacgagtcctgtcaatgaatttatacattttatcaaaaaactgccttgaataccttgatttgatggaacaccgtagcttcgtttaatatctccagatattttatctaaatcacttagtaattttgttacttttttatttcctgcacttatccccgattcatcgtaggtcacatgaatctctcggattacatctcgacacgtacgaaaatgatcatgtgttctaagctctaaagctgaattgataacttgagagacatttcctgtttcgtttgctagccatgcagaaaatattggtaaatctaatgaaatagtagatgtgcgtccatgatctacaatttcagatcttgcagtactgattttatcagacaacgattgcaccaaccttgcagtataatcatgaccaaaagcacctgtttttttcatccaatgcaattgatatgcatgccttattggatgaataaatgagtctgctttaaaatgcttagcaatgacgctgtaataaatagatttatatgccaaccaatttagcgatgcgataaacatttcaagtgaacgagtcatacctcctttaccgcgagtagatttttccctttctagttcaaattcacgctcagtatattcatgtccagatgaactcactagcttcacatcggttgaccagtaccctttcgtatcagaagcatctgataattcattaaaaatcgatgcacttagttcactatatttcgcatattcaggagtaccgggctgaccaagcattttcattgttaagtaatacacgctagaccgaagatcccatgtgcaaatcatattcagcttaagcatctctacaagttgcctaaaatcatcgtcaacaaactccccacctctaatttcgggagtaatttgccgagattcaacttgtgctaactgatcaagttcactgagttgaaaatcactttcagatacaaatttaataaagtcaaatttagcaatgcgtttatctctatattcttttttataattatctacacagatcagggtatcgtaaaaaagtatcgcttgaataagattttcaaaagcgactaaatctccgttaatagtatctggattcttaacaagaatatcacccagtgttctttcgactgctgttaacgaagcattatcaatcaacgcataagacattaaactacctccattagataatatttaataacattatatttcaattaggtnnnnnnattgtgatacttatgacagatttgagtgacattttatcaatctactgattttgatggtgaaatttattagaaggtatgcgtagtgctacgggagaaatgagaaacgcgcccagcaatggcgcatcctttcttaagcaagttggctagtatctatagcatccatccaatcaggagcaattcccaaacgttccgcgaactcttcattggtcacgtcttccattgagagactagccagacaatcgttaatttcagaatagacgggggaaagtaataggtattcccgcaactctttcaggtctttttccatcttaacactccttgttaatagaccgtcgaacaatggtacagatttgtaccattccaagtactggcaagcaaccccaccagcacaacaaattatctcatacggtaaaaacggtgtcgggctgtttctttcggctagctcaatatatcaccttaaacaccagccgttatcattgtctcaattgggtataccgtaatgacaaggtgatacaaagtctcaatagggttgtataggaacattttgactacacaaactgcattatgtatcatttgcacttatattcacaacccttttgagacaatgcaatgaacgttagaatttactgccgagcatcaactgaggggcaacacgctgatcgagcacttaccagcctacgtgaattttcaaaatcaaaaggctggcagattgcaggagagtatatagaaaatgctagcggggcgaagcttgagcgcgtagagcttatgcggctattgtctgaagcccagtccggcgatctgttgctagtggaagctatagatcgtctgagtcgcctagaacatagtgcatgggtcgaactgaaagatacgctcaaccgaaaagggttaatcatcgtatcaatggatttaccaacgagctggcagatggtcgagatggcaggcaatgatctaaccagcggcatcctgagagccgtaaatgccatgttgattgatatccttgccacaatggcacggcaggattacgaaacacgccgtaaacgccaacagcaaggcattgaacgagctaaaagcgaaggcatatacattgggagggcgaaaaatcaggaagcccgagagatcgttagagagatgttggagcaaggagtaaaacctgaactcatcatgaaggcagcaggaatcagccgagcgacttactaccggataaaaaacgagctattgatcgtaaaatcagaataaaatttgaaaggtcgtcaggcttgtttcatcaggtaaaaaccagcatttctgatcacaacgcttgggggcacctattggggcactcaccaaaatcgaaagagaaataaactacaattcaaattgttagctaatttttcgattcctgcagggacaccagatacccttcaaaccaaatctaccttcatcccgtaaacgatgggtttggcagcacacttgccctatatctactcatttttactgcaacaggttgaaatctcagcactgtcagaaagcgctgatgactaaacagcccagggccgggcgatgtaaccatcacacagaatcctgatagcgaaatacggcgtgactcgatacttcactccgcaatgcattccttgatgaattcgcaggcccgtgatacacgggacaggtcgcagaatgacgacaatgtcctggaaatcagcgaaccgtgtatccggagtacatttgagcgactgtaccagaacatgaatgaggtgtttggattaggcgattattagcagggctaagcattttagtattattattttccggttgaaggatatggagatatcgacaacaaccggaaaaagtttacgtctatattgctgaaggtacaggcgtttccataactatttgctcgcgttttttactcaggaagaaaatgccaaatagcaacatcaggcagacaatacccgaaattgcgaagaaaactgtctggtagcctgcgtggtcaaagagtatcccagtcggcgttgaaagcagcacaatcccaagcgaactggcaatttgaaaaccaatcagaaagatcgtcgacgacaggcgcttatcaaagtttgccacgctgtatttgaagacggatatgacacaaagtggaacctcaatggcatgtaacagcttcactaatgaaataatccaggggttaacgaacagcgcgcaggaaaggatacgcaacgccataatcacaacaccgataagtaatgcattttttggccctacccgattcacaaagaacggaataatcgccatgcacagcgcttcgagtaccacctggaatgagttgagataaccatacaggcgcgttcctacatcgtgtgattcgaataaacctgcataaaagacaggaaaaagttgttgatcaaaaatgttatagaaagaccacgtcccaacaataaatatgacgaaaacccagaagtttcgatccttgaaaactgcgataaaatcctctttttttacccctcccgcatccgccgctacgcactggtgatccttatctttaaaacacatgttgatcatcataaatacagcgccaaatagcgagaccaaccagaagttgatatggggactgatactaaaaaatatgccggcaaagaacgcgccaatagcatagccaaaagatccccaggcgngcgctgttccatattcgaaatgaaaatttcgcgccattttttcggtgaagctgtcaagcaaaccgcatcccgccagataccccaggccaaaaaagagcgcccccagaattagacctacagaaaaattgctttgcagtaacggttcataaacgtaaatcataaacggtccggtcaagaccaggatgaaactcatacaccagatgagcggtttcttcagaccgagtttatcctgaacgatgccgtagaacatcataaatagaatgctggtaaactggttgaccgaataaagtgtacctaattccgtccctgtcaaccctagatgtcctttcagccaaatagcgtataacgaccaccacagcgaccaggaaataaaaaagagaaatgagtaactggatgcaaaacgatagtacgcatttctgaatggaatattcagtgccataattacctgcctgtcgttaaaaaattcacgtcctatttagagataagagcgacttcgccgtttacttctcactattccagttcttgtcgacatggcagcgctgtcattgcccctttcgccgttactgcaagcgctccgcaacgttgagcgagatcgataattcgtcgcatttctctctcatctgtagataatcccgtagaggacagacctgtgagtaacccggcaacgaacgcatctcccgcccccgtgctatcgacacaatccacagacattccagcaaaatggtgaacttgtcctcgataacagaccacccccccttctgcacctttagtcaccaacagcatggcgatctcatactcttttgccagggcgcatatatcccgatcgttctgtgtttttccactgataagtcgccattcttcttccgagagcttgacgacatccgccagttgtagcgcctgccgcaaacacaagcggagcaaatgctcgtcttgccatagatcttcacgaatattgggatcgaagctgacaaaacctccggcatgccggatctccgtcatcgcagtaaatgcgctggtacgcgaaggctcggcagacaacgcaattgaacagagatgtaaccattcgccatgtcgccagcagggcaagtctgtcgtctctaaaaaaagatcggcactggggcggaccataaacgtaaatgaacgttccccttgatcgttcagatcgacaagcaccgtggatgtccggtgccattcatcttgcttcagatacgtgatatcgactccctcagttagcagcgttctttgcattaatgcaccaaaaggatcatcccccacccgacctataaacccacttgttccgcctaatctggcgattcccaccgnnnnngntagctggcgcgccgccaggacaaggcagnnnnnngcccgtctgattctggcaagagatctacgacccgcatcccctaaaacccatactttggctgacatttttttcccttaaattcatctgacttacgcatagtgataaacctctttttcgcaaaatcgtcatggatttactaaaacatgcatattcgatcacaaaatgtcatagttaacgttaacatttgtgatattcatcgcatttatgaaagtaagggactttnttttnnnnaannnnaacgttaacaattcaccaaatttgcttaaccaggatgataaaaatgacgcaatctcgattgcatgcggcgcaaaacgcactagcaaaacttcacgagcgccgaggtaacactttctatccccattttcacctcgcgcctcctgccgggtggatgaacgatccaaacggcctgatctggtttaacgatcgttatcacgcgttttatcaacatcacccaatgagtgaacactgggggccaatgcactggggacatgccaccagcgacgatatgatccactggcagcatgagcctattgcgctagcgccaggagacgagaatgacaaagatgggtgtttttcangtagtgctgtcgatgacaatggtgtcctctcacttatctacaccggacacgtctggctcgatggtgcaggtaatgacgatgcaattcgcgaagtacaatgtctggctaccagtcgggatggtattcatttcgagaaacagggtgtgatcctcactccaccagaaggaatcatgcacttccgcgatcctaaagtgtggcgtgaagccgacacatggtggatggtagtcggggcgaaagacccaggcaacacggggcagatcctgctttatcgcggcagttcattacgtgaatggactttcgatcgcgtactggcccacgctgatgcgggtgaaagctatatgtgggaatgtccggactttttcagccttggcgatcagcattatctgatgttttccccgcagggaatgaatgccgagggatacagttaccgaaatcgctttcaaagtggcgtaatacccggaatgtggtcgccaggacgactttttgcacaatccgggcattttactgaacttgataacgggcatgacttttatgcaccacaaagctttgtagcgaaggatggtcggcgtattgttatcggctggatggatatgtgggaatcgccaatgccctcaaaacgtgaaggctgggcaggctgcatgacgctggcgcgcgagctatcagagagcaatggcaaacttctacaacgcccggtacacgaagctgagtcgttacgccagcagcatcaatctatctctccccgcacaatcagcaataaatatgttttgcaggaaaacgcgcaagcagttgagattcagttgcagtgggcgctgaagaacagtgatgccgaacattacggattacagctcggcactggaatgcggctgtatattgataaccaatctgagcgacttgttttgtggcggtattacccacacgagaatttagacggctaccgtagtattcccctcccacagcgtgacacgctcgccctaaggatatttatcgatacatcatccgtggaagtatttattaacgacggggaagcggtgatgagtagtcgaatctatccgcagccagaagaacgggaactgtcgctttatgcctcccacggagtggctgtggtgcaacatggagcactctggcaactgggttaacataatatcaggtggaacaacggatcaacagcgggcaagggatccgcgtcacacttcccccttcacgaccttcaataatatgcaatgcagcttcccgcccgataatgtcatgtggaagctgaattgtggtcagcggcggtaaaaacagatgcccgacgccaaccagattatcaaagcccattacggcgacatcctgcgggatacgtacccccttagccaggagaacctgataagccacaaaggctgcgcgatcgttaccacatatcagaacatcaaaatctggtttgcccgatttgaagtggtcattgagtaaacttgcgagatcggtgtagtgatcatcacctgttgccatgtgaaattgtttcacctcagccagatctcgtccagcatcacgccaggcctgctcaaatccctgccgacgataccctgttgccaacgcactttccggtagccagaagcataacggttgacgatagcccgccgcgagcaaatgctgtgttgattcatattgtgcagtgtaatcatcagggatataactgggtaacgctgggtcatccgccacacagttcgccaatacaatattttcaccatacagagactcaggtagcgtgatatgtcgcagccccattgtagtatagataatgccatccggacggtgggcaagcagctgacgtgnnnnnnnggnagcgtcatcttcagaaaaaatattgattaaaaaactattccagccgaactcgctggcggtttgctcaatggcaagcagaatatcaacagagaaaggagtggtagcagtgtcctgcgccagcacggcgagagtcgacggcttacgtccttgagcgcgcatcttacgggcggaaagatcaggaacataattcagggtctggattgcctgcaatacgcggtcacgcgttgcaggacgcacagattctgcattatgcatcacccgggagactgtcatcatcgacactcccgccaggcgtgcgacatcctttaatgaagccatacccaagccgtttgccgtaaaacgggcactgtagcagaaacagacgtcactggcgagatccaacgaaattctcgacgccctatcacccgacacggcaatacaataaaaaataacaataattgccggataattgtacccaattccgcctctgttctcgccaacgagtgaccatataggcaagtaagaaaaacatgccaactggcatcgccaacctggagaagaaaatataaatatggatcattgtgctgccgctgtatcccgacatcagcccggaaattattgcgattgctatcggttcaggcgcgattggctgcacgatcgttacggantcgcttttctggctggtgaagcaatattgcggcgctacgctcaatgaaacatttaaatactatacgacagcgacatttatcgcttcagtcgtcgctctggcgggcacattcctgctgtcatttatcatctaagcgcaaagagacgtactatggaaaacgctaaaatgaactcgctcatcgcccagtatccgttggtaaaggatctggttgctcttaaagaaaccacctagtttaatcctggcacgacctcattggctgaaggtttaccttatgttggcctgaccgaacaggatgttcaggacgcccatgcgcgcttatcccgttttgcaccctatctggcaaaagcatttcctgaaactgctgccactggggggattattgaatcagaactggttgccattccggctatgcaaaaacggctggaaaaggaatatcaacaaccgatcagcgggcaactgttactgaaaaaagatagccatttgcccatttccggctccataaaagcacgcggcgggatttatgaagtcctggcacatgcagaaaaactggctctggaagcggggttgctgacgcttgaagatgactacagcaaactgctttctccggagtttaaacagttctttagccagtacagcattgctgtgggctcaaccggaaatctggggttatcaatcggcattatgagcgcccgcattggctttaaggtgacagtgcatatgtctgctgatgcccgggcatggaaaaaagcgaaactgcgcagccatggcgttacggtcgtggaatatgagcaagattatggtgttgccgtcgaggaaggacgtaaagcagcgcagtctgacccgaactgtttctttattgatgacgagaattcccgcacgttgttccttgggtattccgtcgcaggccagcgtcttaaagcgcaatttgccgagcaaggtcgtattgtcgatgctgataaccctctgtttgtctatctgccgtgtggtgttggcggtggtcctggtggcgtcgcattcggacttaagctggcgtttggcgatcatgttcactgcttttttgccgaaccaacgcactccccttgtatgttgttaggcgtccatacaggattacacgatcagatttctgttcaggatattggtatcgacaaccttaccgcagcggatggccttgcagttggtcgcgcatcaggctttgtcgggcgggcaatggagcgtctgctggatggcttctatacccttagcgatcaaaccatgtatgacatgcttggctggctggcgtaggaagaaggtattcgtcttgaaccttcggcactggcgggtatggccggacctcagcgcgtgtgtgcatcagtaagttaccaacagatgcacggtttcagcgcagaacaactgcgtaatgccactcatctggtgtgggcgacgggaggtggaatggtgccggaagaagagatggagcaatatctggcaaaaggccgttaataacgtttcaacgcagcatcgcaatcctttccctgggtgagcgatgctgccgatggcgcagacttaagatccccagtcttacccgctataaccccctgcttttaccatcacccaacgcctttcgctgtaaacggcggtttcgcaaaccaaaccaaaaccgtaagtaagataaaagcaatagccgccatacggaaaatctcatttgcagaaatagaaagtgactgctgggttatttcattattaatttcattaagaactcctgaaagcgaaccatagtatttatccataatttgtgacgatgaattaaacacggggttaaattgatcgatggttgctgtcaactgactatggtgtaacgattcgcgtcgtccccacagcgtcattgtcaacgacgtaccaactgatcctgacaaggtacgaaaaaaattactcatactcgaggcattggcaaatttattatctggcaagcctgaaaacgaaatcgttgttaagggtaaaaagaaacaggcaacggcgaatccctgaaaaaactgtggcaaaatgatacctgtaaaatcaatcgttggcataaatgtcacagaacgccagtaatagcaaaccgcatacatcaaaaaactgaatgtcaccaacacccgcatgtctattttgttgccataacgtcctatcaaaggtgaaattaatagtggcatgatgccgatgggcgcataagcaagtccggcccatatcgcattataccccatcgtttcctggagtaactgcggcataaggacgatcgctccagagtaaaataaatacgcgcatgtgatactcacaataccaatggtgaagttacgggacttaaacaaactgagatcaagaatcgggttctctgaggtcgactcccaaatgactaaagagatcagagaaataactgatactactgttaatattattattgtactcgagttgaaccaatccagatcgcgccctttatcaagcataatttgcaagccaccaacaccgagcactaacagggtcagtcctggtagattcattttgaccggtgaagtctcagtttctcttcctttaagtaaggttaagcataatgtcaggacgataatccccatagggacattgattaaaaatatccaaccccagctaaagttatcacaaatataaccgcccaatatcgncccacatatcggagcgataatcncggtcattgaccataatgccagagcaaatgttcttttttctggtggataattccttaataataaactctgtgacagtggaattaacggccctgccattaacccctgaacgactctaaaaaatatcagcacatcaagattggtcgataaactacacattaaggaagacagcgaaaaaaaagtgactgaaagtaaaaataaccttaattcgcctattctttgtgccagcctgccggtaacagggatcgcaatggcatttgntacgccaaacgaggtgataacccaggtgccttcgtctgttgatgctcccagaaagccagatattgtcggtattgcgacgttagaaatagtggaatccaacatttgcataaacgtcgctaatgacaatgcaatagtgacgcaccataacgtcccaccggttaatggtgccggagttgatttagtgattgccattaaagttgtccattatgcgaaataatgttgctaatttctttttctatcggactggtatcgataactaaagccttactggtataagccgggatggacgtcacggttgaagccagctcaggcatctcagcaatgtcttcgttcttcgtatcaatagttgcagtcatcgataaaccaatgcgcaaggggtgttccatgagttcttttggatcaagagaaacttcaaccggtacacgctgaacgattttgatccagttccctgtcgcattttgtgcaggtaataaggagaacgcattgccggttcccatattgatccctgtcacccggccatgaaacacaacattctcaccataaagatcgctgataatattgaccgattgaccaatccgtacatccgtgagttgtgtttctttaaagttagcattaacccacatttgacgtgccggtacgacagccattaacgattgtccgggactcactgtttcgccgacctgaacacttctctgggcaatatagccggtaaccggactcttaatatccgtacgtttaagcgccaaccaggcttctttggttgcatccgcagcttcaacgacttgtggctgacggtttaatggtgtgttcattactaaagctttattcgctttataagcctggatagcggcattcaatgccgctttgctacttattaacgtatctttggtatgctccagcgtttcttttgaaataaccccctgcttcgctaaaggcacacgacggttataatcttctaaagattgttgatactgaatacgtgctgaagcgacttcggcactgtattgtttatcctgtaagtacagtttattcgtttgccgaacaatatttgccagattatttttagctttattgagtgcgatagtggcatcagttttatccagtgaaactaaaatgtcaccctgtcgaacgtagttcgtatctttatgattaacgacagtgacactacctgagacttgtgcagaaattggatctgcattccccgtgacataggcgtcatctgtactaatcatgtcttctaattccattgaccaataggcataagcacctgaaaacgcaataaataaaactatcgccaataaagaaaagtattttcttctgttagaatgttttttatttgaattaatctgttccactattatctctcatttcgcatagatgaaatttatgaattgaatgaaaagagtattcattcttcatatcaaacacagtgcatgtgttgcacattatcccaggaacgttggaggcctaatttaaatgaggtgcaaaaaaaacaacagaggactaaaccgtggcttttgcaatacaattcttacgcctgtaggattagtgagaagacttatagtgctaacttgaaactataaatcatcggtataatccctgattttattgttgacatttcatatatgccgactatttatatggtatacttgtcgaattatcttaaaggaagctcaaattttcttatttttattgagaaaatgagatgatgccttatgtctgtattactacagggagaagggagatgcttcnttgcnangggaataatctatgannnnnnnnnttattgatgaccatcctcttgctatcgcagcaattcgtaatttattgatcaaaaacgatattgaaatcttagcagagttgactgaaggcggaagtgccgttcagcgggtggaaacacttaagcctgatatcgtcatcattgatgtcgatatccccggagttaacggtatccaggtgttagaaacgctgaggaagcgccaatatagcggaattattattatcgtctccgctaaaaatgacnanntttacgggaaacattgtgctgatgctggcgctaatggtttcgtgagtaaaaaagaaggcatgaacaatatcattgcggctattgaagctgcaaaaaatggctactgctatttccccttctctctcaaccggtttgttggaagtttaacgtccgaccagcaaaaactcgactccttatcgaaacaagaaattagtgtcatgcggtatattcttgatggcaaggataataatgacattgctgaaaaaatgttcatcagcaacaaaactgtcagcacttataaaagtcgcctgatggaaaaattagaatgtaaatcactgatggatctttacacattcgcacaacgtaacaaaatcggctaaccacatgaagtttttaccctatatttttcttctctgttgtggtctttggtcgaccataagtttcgcagacgaagattacatcgaatatcgtggcatcagtagtaacaaccgtgtcacacttgatccactacgtctgagcaacaaggaattacgttggttagcgagcaaaaaaaatcttgtgattgcagtacacaagtcccaaacggctacgttgttgcataccgattcgcagcaacgggttcgtggtattaatgctgattatttaaatcttttaaaaagagcgttaaatatcaaattaacactccgggaatacgcagatcatcaaaaagcaatggacgcgctggaagaaggtgaagtcgatatagtgttatcacatttagttgcttcgccgcctcttaatgatgacattgctgcaaccaaaccactgataattacctttccggcgctggtcaccacccttcacgattcaatgcgaccgcttacntcatcaaaaccagtaaatattgctcgagtagcaaattatccccctgacgaggtaattcatcaatcatttccaaaagcaacaattatctcttttacaaatttatatcaggcattagcatccgtctcagccggacagaatgattactttattggtagtaacatcattaccagcagtatgatttcccgctatttcactcactccttaaatgtagtgaaatattataactcaccgcgtcaatataacttcttcttaaccagaaaagaatctgtcattcttaatgaagtactcaatcgatttgttgatgctttaacaaatgaagttcgctatgaagtatcacaaaattggcttgatacaggaaacctggcctttctgaacaagccattagaactcactgaacatgaaaaacagtggattaagcagcatcccgatttaaaggtgctggaaaatccttactcgcccccctattctatgacggatgaaaatggctcggttcggggcgttatgggggacattcttaatattattaccttgcaaacaggtttaaatttttctccgatcaccgtttcacacaatatccatgctggaacacagctgaatcccggcggatgggatatattacccggtgctatttatagtgaagatagagaaaataatgttttatttgctgaagccttcataacaacgccttacgtttttgtcatgcaaaaagcgcctgacagtgaacaaacattaaaaaaaggaatgaaagttgccattccatattattatgagcttcattcgcaattaaaagagatgtatccggaggtagagtggataaaagtcgataacgccagcgctgcatttcacaaggtcaaggaaggcgaacttgatgctctggtcncgacacagttaaattcacgttacatgatcgaccattactatcctaatgaactgtatcattttcttattcccggcgttccgaatgcatcgctttcgttcgcttttcctcgcggagaaccggaacttaaggatattattaataaagcactgaatgcaatccccccaagcgaagttctgcgcctgaccgaaaaatggattaaaatgcccaatgtgaccattgacacatgggacctctatagcgagcaattttatattgttacgacattatccgttttattagttggcagtagccttttatggggattctacctgttacgctcagttcgtcgtcgtaaagtcattcagggtgatttagaaaaccaaatatcattccggaaagcgctctcggactccttaccgaatccaacttatgttgtaaactggcaaggtaatgtcattagtcacaatagtgcatttgaacattatttcactgctgattactacaaaaatgcaatgttgccattagaaaacagtgaatcaccctttaaagatgttttttctaatacgcatgaagtcacagcagagacgaaagaaaaccgaacaatatacacacaggtatttgaaattgataatggcatcgagaaaagatgcattaatcactggcatacattatgtaatctgccagccagcgaacatgctgtttatatttgtggttggcaagatattaccgagacgcgtgatttaattcatgcactcgaagtagagagaaataaagcgatcaatgcaactgtcgcaaaaagtcagtttctggcaacaatgagtcacgaaataagaacaccaataagctccattatgggcttcctggaacttctgtcgggttctggtcttagcaaggagcaacgggtggaggcgatttcactagcctacgccaccggacaatcactcctcggcttaattggtgaaatccttgatgtcgacaaaattgaatcgggtaactatcaacttcaaccacaatgggtcgatatccctactttagtccagaacacttgtcactctttcggtgcgattgctgcaagcaaatcgatcgcattaagttgcagcagtacatttcctgatcattacctggttaagatcgaccctcaggcgtttaagcaggtcttatcaaatttactgagtaatgctctcaaatttaccaccgagggggcagtaaaaattacgacctccctggttcacattgatgacaaccacgctgtaatcaaaatgacgattatggattctggaagtggattatcacaggaagaacaacaacaactgtttaaacgttatagccaaacaagtgcaggtcgtcagcaaacaggttctggtttaggcttaatgatctgcaaagaattaattaaaaacatgcagggtgatttgtcattagaaagtcatccaggcataggaacaacatttacgatcacaatcccggtagaaattatccaacaagtggcggctgtcgaggcaaaagcagaacaacccatcacactacctgaaaagttgagcatattaatcgcggatgatcatccgaccaacaggctattactcaaacgccagctaaatctattaggatatgatgttgatgaagccactgatggtgtgcaagcgctacacaaagtcagtatgcaacattatgatctgcttattactgacgttaatatgccgaatgtggatggttttgagttgactcgcaaactccgtgagcaaaattcgtccttacccatttgggggcttacagccaacgcacaggctaacgaacgtgaaaaagggttaaattgcggcatgaacttatgtttgttcaaaccgttgaccctggatgtactgaaaacacatttaagtcagttacaccaggttgcgcatattgtacctcagtatcgccaccttgatatcgaggccctgaaaaataatacggcgaacgatctacaactgatgcaggagattctcatgactttccagcatgaaacacataaagatttacccgctgcgtttcatgcactagaagctggcgataatagaactttccatcagtgtattcatcgcatccacggtgcggctaacatcctgaatttgcaaaagttgattaatattagccatcagttagaaataacacctgtttcagatgacagtaagcctgaaattcttcagttgctaaactctgtaaaagaacacattgcagagctagaccaggaaattgctgttttctgtcaacaaaataactaaatagtggctcccacaatgttcaaatgtgggagctatttaccagcacatcttacatttatgatgagaactcctggcgaatttgctccccatgctggtcgagcgttgccgctcccggcataacatgcgggtccgcgcagccactgatttttatcggattacccggcatcattattcccccggcttcaatcaacatatttctcgcctgagtttgtggcaaattaatggcctcagccacannnnataacggcgcgacgggcacaccaacttcatgtattctggctaaccaaacttcagctgcctgtgtttttaacgtccgctcaatatattgtttaagaatagtctggttttgtacgcgtaaaatattgctgctaaatctgggatcattaaccagttccgtaagctccagtgccaggcataacgcagagaaaagcttgtcattaccacaacaaatcgtaatcggcttatcctgagtatcgaaaacatcaaaaggtgccatgtaggggtggcgatttcccaggcgttgtggtgacttccctgtcgcaatatatgccatcagaccatgctccagaaaactcagcgtggcatcaaacatcgctatatcgacatgcgcccctctttggctcttttcgcggccataaagtgcactcactattccgctgaataaataaacaccgccgcatagatccgcaagagaggtaccaacacgcactggcggagcatcagggtaccctgtttccatcattatcccgctcattgcctgaatgatggtatcgtaggcaggagcatcttttagcggaccggtatgtccgaaacctgacgatgaagcatatatgaggcgcgggttgatttcttgtaacctttcccatgaaagccccagtttttccattgtacctgggcgaaaattctcagctaatacatcagcttgtttaagcatatttataaatatacttttatcgtgatcattctttaaatcaagaaccacactctctttaccatgattaataaaactgtaatagagtgtccatccacatagggaccaaatgtgcgggtatcatcaccatgacccggcggctcaactttaattacccttgcgcccatattacaaagaagttgagttccgaaaggtccattaaggacatgtgtcatatcgataactaataagccttcaaacggccctttgctttcattatttgtcatttgcttatgccttgaaaaaagccgaaggtgaaaagacacttcggcatttatgtaaaatcaataacatgattaattatgaaaccagtcgactgacataaatccacaagggagccgtgacgacaaaacccagtacgntcacagccaatgacgctgtaccagtgcgggtgtagacattaaaccggctggcaataatgattccggagaatgccggcggtaatgcgcctgccagtaccatcatctgcagatgttcgctgttcaaatgacatgccataccaacaagaagcagcgccagtggcatcagaatcagcttcaggaaggtgttataagcaatttcggcactgaactcgaatttatgtgcagccagagtcaaccccgcagcgaataccgctacccctgagttagccttcgcaatcagattaaaggttgggtcccatgctgccggaatttttaccccaaccaacaccaggatcgttgccagaacaggtgcccatacaactggctcctttgccgcagaaattaatgcgctcagattactattcttcttaccatccgctcctgaggaaggattcagcaaatacagaccaataggaatagtaattgcgttaacaataatagaaataattgctaccactaaacctgttgatacggaatcaccataaataggatcgagaactgcaaaccccaggaatccaatggtaggtgaacctgcaattaatgcacatacagctgcttctgcatgggtacgtttaaaaaatttgtagcaaccaaaccaggagaaaaagaaacatccgacaataaccacgagtgatacaagggtcagacgagtgtccgcaaaaatcatttccctgtttgcccgggtaatagaaacaaatagggctgcaggaagcgcgtagtttaataccagtttattaaatgcccgggcttgatcttctgaaaaagtttctcgtctgccgctaaaataacccaacagcatgattacgataataggcaataaatcgccaataaaaaatgttagcataatagtatttccgataagggtcccctcaccatcgcataatgagttggcaagaggagacgatgtcagtatttaattaccagcgacttgttttgggttaagtttggtaatatggccactttcagttcctgctgcagggtcgatgaccacattaataatggtcggtttgcgcgactgaataccggtggttaaagcatgacgaagttcatctgtcgtggtgacgttatagccaacgccacgaaacgcatccattaatttgtcataccttgcatggtgcaacagatctgttggtgatggtgcaccagcgccactgagatcaacaccgtctcctctgtagatgccgccattnnnnnnnnnnacgatcgttaccggcaggttatatcgacaaatcgtttcaatttccatcccactgaaaccaaaagcactatcaccttcaatggcgacaaccggagaaccagaggtcacgctagcaccgatggcatagcccataccgatgcccatgacaccccaggtaccacaatccagacgacgacgtggtttatacatatcaataatatttcgtgcattatccagggtatttgcaccttcattaactaaataaatatcctggttctcacgcaatacatcgcgcacagcacttaatgcattaaagtaatttaatggttgggtatctgtacttaatttttcatgcattttttgtgcattttgctgcttgtggatatttaaaatatcgcgccataccagtggagtcgtaaatgtgttttgtttcagctctgccagcataccttgcatactggatgcaatatcgccaacgactggcacagcaatggggcggttgctgtcaatttcctgcggttcaatatccagttgaataaactgtgtatctgccgcccatccttttttaccgtgtgccagtaaccaattcagtcgtgcaccaacaagcatgacaacgtcagcatttgccagggcaaacgaacgcgcagctgccgcagaaagtggatgcgtatcttcgaggatccctttcgccatagacattggcaggaatggaatctgggcactttcaataaattcacgaagctgttcgtcagcttgtgaatacgccgcgcctttgccaaggataattaatggccgttcagcttnngnnnnaagcgaaattgcgctagtgactgacttcgggcatggcaataatgctggcgacggattttcaacttttacaatcgtggttaacgcttcgtctttttccatcgtcgcggccaggacatttgctggcaaatcaagataaactccgccagggcgacccgatactgagacccggatagcgcgtgccaatgcaatgccaagatcctgcggctgattaacgcgaaatgctgctttggcatacggttttgccgcattcatttggtccagctcttcataatcaccttgctgtaggtcgacgatcgcgcggtcgctggagccgctaatcatgatcatcggaaaaccatttaccgttgcgttggccaatgcggtcaaaccattgaggaatcctggcgcagacactgtcaggcagatccctggtttttgggtaagaaaaccgcttgccgcagcggcatagcctgccgactgctcatgacgaaaaccaatataacgaatgccttccgcctgggcatgnngcgccatatccgtcacaggaatacctacaacaccataaatagtgtcaatattattctgttttaatgcttcaacgatgatatgcataccatctgtcatttgaagttgatctgacatgattaataacctcgaaatttttatannnngggagccagaagcccccgttaatatcagatggcgtggttttgcttcattgcagcaatttcatcgtcgctataacccagctcctgcaataccgcagnggtatgttcacctaatagaggcgcagctttaatatccggcgtaaaggcagagaatttcattggacaaccaactgtcagatattttccacgcaatggttgttccacttcgacaacactgccgctttggcgtaaagagggatcaagtgaaatttctttcatacttaaaaccggtgcacaaggaatatcaaactgagtcaaataagccactgcttcatgtttatcaatagtgacagtgtatttttcgatttcagcaaaantatcgaaaatatgtggctgtcgggcatgggctgtactgtatgccggatcggtaatccaatctggtttgccgatggctttacaggtgttttcccagttttgctcctgaatagtgaaataaatataggcgttaggatcagtttcccagcctttacatttcaggatccagccaggctgaccgccaccacccgcattacctccgcggggaactgcatcaccaaatgtgccattcggatactgcgggtattcttccagataacccaatttatcgagacgctgctggtcgcgtaatttcacgcggcaaaggttcaatacggcatcctgcattgacatggtgactcgttgcccacgccccgttttttcgcgatgcagcaaagcagcaagtaaaccgatcagtaaatgcattccggtgttgctgtcacccaacgctgcagcgcttaccagcggcggaccgtcccaaaaacccgtagtggatgccgcgccacccgctgcctgagcaacgttttcataggcttttacattcacataaggcgaacactcatcaaaccctttgatcgaaccaaaaatcagacgtggattgatttcttgaatatgctcccaggtgaagcccatgtgatcaatggcccctggatgaaagttctcgactaagatatcagcttcgcggatcagcttttccattacctctttgccttccgctgttttggtatttaactcaatagaacgtttgttactgttaagcatggtgaagtaaagcgcatcgatatcaggaatatctcgcagctggtgacgcgttacgtcaccaacgccggggcgttcaattttaatgacgtcagcgccaaaccaggccagcatttgagtacaagatgggccagattgcacaccggtgaaatcgagaactttaattccttgaagtggagttgacatagcaatacctattagttaattaaatatgtgttaatttagcgtttatttaaggcataacgccctctataaataatccgcaaaatatcgtcatagcggcactcgatatttttaaattcctgtatcaagtgctgaaaatcatttcatcgctacttccaattcctttctgcatggtaagtagtgaggacgaaaagaagaatatgataaatattggttcgtggtaatcagagagagtcgcgacatttgtgatgttattcttacaactgtnagaagcgccggtgatttacaagtaagggtatgattacgctttttagagcgtaccataaaatataacatattaaatgatttgtgatgacacgggattattgcggtttactttgaggaatataaaatgcgagtttatagaacagcgagcgccaaataattttatgaccacaacctgtcgtattgtggtcataaaaaattgtcggctggagggagttaaatcctttacctcaatatactgcctgtcagcattagttcacaaacagagcttcgctatcgacgatgattccatcttccgcacctttaagcgctaggtttgcctcgtagtattgctttttatcaagcagtttctgcgcatcagcaagtgcattacgagtctgtttaagcggcatcagatattggttttccattacaccaacaccggccaggcgaagntcttccattgcgccctttttatcccctttcgccattttttcntnnnnaatttttatcgcggcttctttttcgggtgtcgctacataactctcagaaattccgacagatgcattaatgacaatatattggtcatcattgacattggtctttttacctggcttagcgaactttgcccattcggtactgtcatctgacaacaaagctgaagcttcattggtcagttcttttgccttttccggatcgccatgaaacagagccaggcgcgctacctgcacgtcacgcatcgcatataaaccttgttcagagatacgctctgctgcagctgccgttttctgggtttgctgaacttgctgagtttgctgttgtgccgctaccggagcattatcagcagcccatacagttgaagatgccagaatagctgtgaccatcgtagccataattaaacgtttcatacttacctcattctttaacagttttagaaaacgccgccatcatattgggtgagcatgaaatgagaaatcagagagcaacggtcattttgaaagggttatcttacagttgtagttattatcgcaagaagtattttagtcttacaattgtaggaatatgcttcctgtcacagagaactattcttatgtaccacaaagagatgtcatttattatatcgatgtaaatattgattaattatatgtaaatacagccataacatcgtacattctcagtgaaccattttcaggataactttctatgaaagtaaacttaatactttttagcttatttttattggtctctattatggcatgcaatgtttttgcattttctaattctggtggtggtagtgagacgagctataaagagccagaaaaaacgtcagcgatgacgacaactcactctacaaaatttcagccatcacaggcgattttgtttaagatgagagaagatgcaccaccattaaacctcacagaagaaaccacgcccccttttccgacaaaggcgaattatcttattcatcctgtgcgatagcgtctgtcacctggcaggtgaacaatcatgtctgatgctgatgtgaacacctgcccaaatgaaccatcctgacccactatcgcctgccataccccaccataaagcgaatcatcaagccacaagccggggcaagaaacataaatatccccgtcaccagttcattaccgccagttaaccacatggtgaagtaataaatgagtgcagcgaggatcaccatgccgaagaaagaagagaccgccgataccacgttcagtacctgaccgatgtatccgcttacgcagacaatacacagggcgagaaacatccataaataaaacatagctcaacctcctgccgcgctaaaaaacctgtaacttcagtcactttaatagtaagacaatccttaacctctggcaatttttgctnnnnnnncaatgaaaacagcatgttaaatgcaatactattgcgtgcggaaaattttttactttgcacgattaataatcagtagctgaaagcagtcagccagtgataaagtncagataccgcattcatgctcctcgtggttatgtcctgactagtctttacactctttacaggaaccattgtcgtacatgatggcccaaccaattgagtgtaccgctgtcgacatggaatcttctgcgatacaacaattcgtatctacagaaggtaactatgtttccacaatgcaaattttcccgcgagtttctacatcctcgctactggctcacatggtttgggcttggtgtactctggctttgggtacagcttccttatcctgttctctgctttctcggcacgcgtattggcgcaatggcgcgaccattcctgaaacggcgtgaatctatcgcccgtaaaaacctggaactttgcttcccgcagcattctgcggaagaacgcgagaagatgattgccgaaaactttcgttcactcggcatggctctggtagaaaccggcatggcgtggttctggcccgacagtcgcgtacgtaaatggtttgatgttgaagggctggataaccttaagcgcgcacaaatgcaaaatcgcggcgtaatggttgtcggcgtccattttatgtcgctggaactgggcggccgcgtgatgggactttgtcagccaatgatggctacctatcgtccacataataatcagctgatggaatgggtgcagacccgtgggcgcatgcgctctaacaaagcgatgatcggcagaaataatctgcgcggcattgtcggtgcactgaagaaaggtgaagcggtatggtttgctcccgatcaggattatggtcgtaaaggcagctccttcgcgccgttctttgcggtggaaaatgtcgccacaaccaatggcacctatgttctctcccgtctctctggcgcagccatgttgaccgtaacgatggtaagaaaagcggattacagcggatatcgtttgttcatcaccccagagatggaaggctacccgacagatgaaaatcaagccgctgcctatatgaacaagattatcgagaaagagatcatgcgcgcaccggagcagtacctctggatccaccgtcgctttaaaacgcgcccggtgggagaatcgtcgttgtacatttaacaaactgctcttactctttccctcctcaaatcggccataataacctcatggtttttatggcttttttcttaagattttttccttcgctgaatatctaattattaccgccagaaattaaactgtcgccgatatgagacacctgtaagctactaaaagtaaataagaaaatgcctcttgtctcgtttcagttttaggcgtacattagcgccgtctcgagcagtttagctcagaattctggggtgatgcccacggtaaaatacaggacttttaaggtcgttttgcccggtgtcaactcactgtatcaggtgtgatgaagtcattcaggcgtaacagtaattacgcggagagatgtaaagtgaaatatttctttatgggcatttcttttatggtcatcgtttgggccggtacttttgccctgatgatctaaaagcaaactgtgcaatgaaaaacaggagccatcaggctcctgtttgcatttctgacgacggtgtttattccgcgttttcgtgaatatgtttgctgctggcgggtagtaaaccgtcggcacggaacatcgctttaatcccacgaatcgcctgacgaatacggtcgcggttttcaatcagtgcaaagcgaacatgcgtgtcgccgtagtcaccaaagccaatccctggagagacacagaccttcgcttcgttaaggagcttcttggcaaattccagcgatcccatggccgcatatggttccgggattttcgcccagacatacatcgaagccttcggcatttcgaccatccagcccgcttcatgcagccctttaaccaatacatcgcggcggcgtttgtactgttcggcaatgtcgcgcacgcactgttgatcgccctccagcgccgcaatcgccgccacctgcaacggcgtaaaagtgccgtaatcgtgatagcttttgattcgcgccagggcactgaccagcgttttgttgccgaccataaagccgatacgccagcccgccatgttgtagcttttcgacagcgtaaagaactcgactgccacatcgcgtgcacccggtacctgcatgattgacggcgctttccagccatcgtagacgatatcggcataggccaggtcatggaccaccagcacatcgtagcgtttcgccagcgccactactttttcgaagaactccagttccacgcattgcgcggttgggtttgacgggaagccgaggatcatcatcttcggtttcggataactttcaagaatggcgcgctccagttcgttgaagaaatcgacaccttccaccagcggcactgagcgtacctgcgccccggcaatcaccgcgccataaatatggatcgggtagcttggattcggcaccagcaccgtgtcaccatgatccagcgtcgccagcatcaggtgtgccagcccttctttcgaaccaatggtgacgatggcttctgattccggatcgatttcaacgtcgtagcgatcctgataccagcgggaaatggcgcgacgtaaccgcggaatgccgcgtgaagtggagtaaccatgcgtgtccggacgctgggccacagtacataatttttcgacgatatgcggcggagtcgcaccgtccgggttacccatgctgaaatcgataatatcttcgccgcgccgacgcgcagccattttcagttcagcggtgatgttaaaaacgtagggcgggagacgatcaatgcgcgtaaagcgacgttcagggcgagtgtcagccataatttcctcagattaacgttagngcccggacngtccgagngacgctgccacgatggtggctgttttgaaaatagcctgattaatttctgtctgtccagcgttttagaacatttttattaatgacgttaaatgaggaactctgctttaaaaacaggaaatttatctgcgctaacaagaaaattaccactcattttattaacataataatttcaataaatttactaaccagaagtgcattatcaagagatgcattgctaatacaccatttatctatcaatccccttttaaaattgtggtttttcctcaaaaacggcctgctggtcatcagccttcaggttacctatcatagaggtttaatccttattcagagtcacccgtgcacgaaatattcaacatgctgctggcggtcttcgatcgggcagcgttaatgcttatctgcctgttctttctcatccgtatccgcctgtttcgcgaactgttgcacaagtcggcacactcaccgaaagagttgctcgccgttaccgccattttctcgctgttcgccctcttcagcacctggtccggcgttcccgtagaaggctcgctggtgaacgtacgtattatcgcggtgatgtccggcgggattctgtttggcccgtgggtgggcatcattaccggcgtgattgcgggtattcatcgttatttaattgatatcggtggcgtgacggcgatcccctgctttatcaccagcattctggctggttgtatatcgggctggatcaacctgaaaatccccaaagcacagcgctggcgcgtcggtattctcggcggcatgttgtgtgaaacgttgaccatgattctggtgattgtctgggcaccaactaccgcgttagggatcgatatcgtctctaaaatcgggattccaatgatcctcggcagcgtctgtatcggctttattgtgcttctagtgcaaagcgttgagggcgaaaaagaggccagcgccgcgcggcaggccaagttggcgctggatatcgccaacaaaacgctacctntgtttcgccatgtcaatagcgagtcattacgcaaagtttgtgaaattattcgcgatgacattcacgccgatgcggtggcgattaccaataccgatcatgtgctggcctatgttggtgtgggtgaacataactatcagaatggcgatgacttcattagcccgactacccgtcaggcgatgaattacggaaaaatcatcattaaaaacaatgatgaagcccaccgcacaccagagattcattccatgctggtgatcccattgtgggagaaaggcgttgtgaccggaacgctgaaaatttactactgccacgcgcatcagataacctcgtcattacaggaaatggcggttggtctgtcgcaaatcatctccacgcaactggaggtttcacgcgccgagcagctacgtgaaatggcaaataaggcagagcttcgcgccctgcaaagcaaaattaatccccatttcctgtttaacgctttgaacgctatttcatcgtcgatccgtctgaatccggataccgctcgccagctgatctttaatctgtcgcgttatctgcgctataacattgaattaaaagacgatgagcaaatcgatatcaaaaaagagctgtatcaaattaaagactatattgccattgagcaggcccgctttggcgacaagctgacggttatctatgatattgatgaagaggtgaattgctgcattcccagcctgctgatccagccgttggtggagaatgccattgtccacggtatccagccttgcaaaggtaaaggcgttgtcaccatcagcgttgcagagtgcggcaatcgggtacgcattgcggtgcgggataccgggcacggcatcgatccaaaggtgattgagcgggtcgaagcgaatgaaatgccgggcaataaaattggcctgctgaatgtccatcatcgcgtgaagttattgtatggcgaggggctgcatatccgccgcctggaaccaggaacggaaattgcgttttacattcctaaccaacgcaccccagtcgcctcacaggctacgttattgctttgagccggagtgatattgtgaaagtcatcattgttgaagacgaattcctggcacaacaggaactgagctggctaattaaagagcacagccagatggagattgtcggcacctttgacgacggtctggacgtgttgaagtttttgcagcataaccgcgtcgacgccatttttctggatatcaatattccgtcgctggatggtgtgttgctggcacaaaacatcagccagttcgcccataaaccgtttattgtgttcatcaccgcgtggaaagaacatgcggtagaagcgtttgaactggaggcgtttgactacattctaaaaccgtatcaggagtcacgcattaccgggatgctgcaaaaactggaagcagcctggcaacaacagcagaccagcagcacgcctgccgcgacggtaacgcgtgagaatgacaccattaatctggtgaaagatgagcgaataatcgtcacgccaattaacgatatctattacgccgaagcgcacgagaaaatgacctttgtttatacgcggcgtgaatcctacgtaatgccgatgaacattaccgaattttgcagcaaactgccgccgtcgcattttttccgctgccatcgctcattttgtgtcaatctgaacaaaatccgcgaaatcgaaccgtggtttaataacacctatattctgcggctgaaagatctggattttgaagtgccggtcagccgcagcaaagttaaagaattccgccagttaatgcatctttaatcgggaactttcatnaaagcaccaggcttgcccgccgatcaacaatttttcgccgatctgttcagcggcctggtgcttaacccgcaactactggggcgcgtctggtttgccagccagcctgcctcgttgccggtgggcagtttatgtattgattttccccgtctggatatcgtgctgcgcggcgaatacggcaatctgctggaagcaaagcagcaacgtttggtggaaggagaaatgctgtttattccggngcgcgcggctaatttaccggtcaacaacaaaccggtgatgctgttaagcctggtgttcgctccgacctggcttgggttatcgttttacgatagccgcaccacgtcattgttgcatcctgctcgccagatccagcttcccagcctgcaacgcggtgaaggtgaagcgatgcttaccgccctcacccatcttagccgttcgccgctggagcaaaatatcattcagccgctggtgttaagtttgctgcatctttgccgtaacgtggtgaatatgccgccgggcaattcgcagccgcgcggcgattttctctatcacagcatttgtaactgggttcaggataattatgcccagccgctcacccgcgagagcgtggcgcagttttttaatatcacgcccaatcatctgtcaaaactgtttgctcagcatggaacgatgcgttttatcgagtatgtgcgttgggtgcgaatggcgaaggcgaggatgattttgcagaaatatcatttgtcaattcatgaagtggcacagcgttgcggttttccggatagcgactatttttgtcgcgttttccggcgtcagtttggtctgacgccgggagagtacagcgcccgttttcagggctaacgtcagaaggttaattctgtttccagcagcgtcaggatactttgtgcatcttgcgcggcaaacaacgactggcggaagtttttattcaccagtttacgcgccagctgcgagaagactttcacatgattcatcccttcgttagcacccagcgtcagcatgatcaccagttcgacttcgcccatttctgactgccagtcaaccggtttcgccagccgggcaatgctgatactggaatgacggatccactgagatttggtgtgcgggatcgccacgccaaaaccaacgccagtggtgacaatctcttcccgctgccagacatcctcttccagctcgaacggatgttcagtgcgcccgttaacgccgaggttaccgcacaggaactggatcgcctgctctttattgctaaaggcctgatcaacgaagatattctccagcgccagcagcgggcgaacgtcttcttccggcgtaaaggcggtgagtaacgcttcaatttcctgcgcgctgcgacattcacacgcctgacgtgccagttcccgacacgcctcgctatccagttgacgaagctggcttttcaccgccggaatgcgcgggctactcatactcagctcatccaggcccagcccaagcagtagcggcagataacggctttcaccgcccagttcaccgcaaatgcctacccatttgcnccgctgatgcgcagtggtaactatttgctgcaacatgcgcaggaacgatggcgtaatcgggttatatagcggcgatacgcgcgggttattacgatcgaccgcatacagatactgggtcatatcgttggagccgatactgaagaaatcgacctcatcgcagaagtgatcgatgatgtagcacaccgacggcacttccaccatgatacccagcgtaatcgtctctgcatgacgcaggccatcgcgcttaagctcaacgatcgctttttggatctcgcccttcacccataagatctgatcgaggctgtggaccatcgggatcatcaactgggcgttgccgaaactggcggcgcgcaaaatggcccgcagttgagtgcggaacaggccagcaaattccgggtaaatacgtaccgcgcgatagccgaggaacgggttctcttcctggggaatattcagataaggaatgcttttatcgcctccgatgtccattgtgcggaagataatcggcttgtcgcccgctgccagtagcacctgctggtaggcttcaaattgctcctgctcgtccggctcgctgtcgcgatccatatagagcatttcggtacggaacagcccgacgccttccgcgccgttggcaaacgcgccaggcgcttccagagcggtgccaatattcgccgcgatatcaatacgcttgttatcacgggaataagccagctgcgcggcagcctgcgcctgttgtttttggcgtttatccgccagcgtctgcgcgacctgataataaccgctcaccgcgtcattcgggttaatcgccagcacgccgcactgggcgtcaagcactgcaggttgcccggcataacgcgcgatcgcatccagcggcaggccgctcagtaccgggatcgccgaggcgcgggccagaatcagggtatgcgaggtgcgcccggttttctccagaatcatgcccgcaagattttttaaatccaggcttaaaaactggcttggggttaaatcctcggccaccagaatagtcggtttttccagcaccagattgttgcgcggcttcagttccggccaggtaatatgcagcaactgttcgctaatatcgcgaatgtcgctaacacgttcgcgcagataatcgctggcagaagcagaaagtttggcgcaaacctgctccatatttctgatgatcgccgcccccagcccctgatgctgttctgtcatcaggcgacggatattgcctgcaaattcatcatcctgaatcagcgacaaatgggcgctgaggatagttttgctttcgccgtcacgctcacgcaattgctggttcagttgctcggcaagcgttgccaggctgtgctccagccgggtggaatcttgcgcactggcggggattgcccgataactgtcgaggctgtcgctttgtaacagggtcagcgtacccacgccgacgccgcttgccagcacattgccgtacagtaaatccgggttaaggcggcttaatgaacgcggcagcggatgcgccgtcagttctgcctgcgtaggctgaacgctgtcgctgtcgataaagcgcacctggatgtactcttccagcacgcgccgcgcctgctcttcatcgctgccgctaatgttcaggctgcaactgtcattaaatagggtgccggtgccaatcagcgccagcgagcttttggcatcggcctttgcgttctggcgatggttaataaaagtgatttcgctttgccactggctgcactgttctttaagttcccacgccggacgagcatgtagaccgttaggcaaaggacagagaaattgaatcgttaacataaccgctccgggttaatcaggagatcatctgaaatccgtcagttgaacaaccgtctcacgcgtaagacgttgaataagggcagataaaagttgctccatctgcaaaatgtcacggcaatcggcaatcgacgcggcgcaatgtccgtggcgggtggcaggccccatcaccactgtgggtacgccagtaccggttaagtgcaccgctccaccgtccgtgccgccgttactgaacatatccgcctgtaacggcacgccaatttctgccgccacggtttcgatccaggcggtgagttttggcggcgcaatcagtgacttgtcgcttaacaccagcatcgggccgttaccaatctggcgatggttagccgcgccataattaaagtttttcgcccagcaggcggtatcaaggacaatggcgacgtccggcgacaccgnnnnggtggcagtttgcccgccgcgtaaccccacctcttcgctggaactggccaccagccacacttccgcaggcagttcagcgctgtgtagttcgcgcagtaacgtcaccagcaggtagcaaccgaggcggtcatcaaaggctttccccatcacccgctggtgggggagaacctgaaaagtggtatcgaacgtgacgcgatcgcctggacgaattcccgcctgcatcacttcgtcatacgagcgcgcnnnaatatccacgcgcatggcgctgacatcattcccctgccggtcgccgtcaagcaggcctggaattttgcactcttcacgggtggtgatgcgcaccggctgcagctggcgggcagccatgcgtacattgccaaccggcagcacatcaatcgccccttcgcgggagatgctgcgcaccataaatcccacttcgtccatatgcgcacagatcatcaccttcggacctgtcgattcattgaggcggatcagcaccgatcccagcccatcaaatcgcacttctttttgcaggcgatccgcttcttccagcaggatctgccgcacttcctgttccgaggaggcgatcgcatctgcctcgctcaacgctttcaatagcgataaatccattatgcctctcccgtgagcaacactgttttcggcatggcgtagagcacttctgcgccttgcggggtgaccagcacaacatcctcgatgcgcacgcccccttgccctggcaaataaatccccggctccacggtcagtaacatgcctggctgtagcgtcgtggtgtcccgcggtgaaaaacgcggatcttcatgaacttcaatgccgatagcatgaccggtgttatgaccgaaatagtggctaaaacctgcctcggtaatcacccgacgcgcggcttcgtcaacctgctggcagcgcacgccggggcgaattgcagagattgctgcgagctgtgcctgcaaaacaatctgatagacgttaaacagcgggtgagattcggcgctcaccccttcgccattcaccagcaaggtgcgcgtcatatcagagcagtagccctgatagagcgcaccgaaatcgagagtgacaaactcgcccgctgcaacaatcttgtcgctggctttgccgtgcggcagcgccccacgccagccactggcgacaatggtgtcaaaagaggttttttctgcgccctgctggcgcataaaccactccagttcagcggctatctcgcgctcgctcatccccacctgaataaagcggcgaatatgctctgcaccgcgatcggcaatcccacaggcaaggcggattttctccacctcctctggcgttttgatttgccgcagcacatccggcgtggcgctaaccagtttcgcattgagttcagactgccagcgatgcgcggtttcccaactcacctgctggccttcaaaaccgagcgtttgcaactgctcatcggcaatgatttgcctggcgatggttgtaagcgtgtgcgtcgcgtcaagcaaatgcagctggtaaccttgcgtgcgggcttctacatccgcgtaatagcgcgagtccaccagaatgtgcgcactttcacggctaatcagcacatagcctgatccggtggagatccccagatgcggctgtttgttctgccgtgaggagagaagcaccgcatccagttgttgcgccttaagccagtcgcgcagcgaagcgagtaatgtcatctggattttccttcttacaggctatcgattaacaatttgcctttacggaacatcatcagacgcaggaacaccaccatcagcgcagttatgactgcccccagcgcgatccccgccatatagacgcccaggttagtgaccagcggccatgcccagatagcggattccgggaaccattgcactgcgcccagccagacagcggcggttgagccgacaatcgcgccgaccatatacgacggaatggcggtgatggggctttccagcgcaaacggaatcgcaccctcactgatccccataaaggcaaggaacatcgcggtcttaccctgcggataaagttgtgcgttgaacaggcgtttgccggttaaacgacggtcaataatggtcgccagacccagaccaatcggcggaataacgatagcgatagaacgagcggtgaccggtaatacgtggtcagtggtaaagctgaaggcaacaaaacctgcggctttgttgatcgggccaccaaggtcgattgctgtcgccgcggcgatccccattgcgtacatcagcgcgcccttctcacctgcggcagtcagcacagtacggataccgccgttgatccagcccccaaagggggtgatgacgtagtacatcgccagcatgacaaaaatagcggaaagaatcggtagcaaaaatgtggttttgaacgctaacaggaaatccggtaactggattttctggttcatccatttcacaaggtaaccggcaacgatagaaataatcagcgcaccaatgaaggtggacggcaccggcgaagaggtcgcccattgcatagtgctgggatcgaagttcagcagttgcgtcggctgggtagacatcaagccgccgataaaaccagccggaaacgccagtttgccaccgatagagttcgccacaaaagcagcaaacatcggaatggcaaaaccaaacaacacgccgccgaaggactgcgacaaccaggcaaatttcagtaaggagaggtcgaaaccggagaatttcccgctattaagagcatccatgatgccgatctcagcaggaattttaagccagctataagcaatcaactggctgaaagcgaggatcacaccgcccataatnaaggtcggcaccatgcgtgaaatccctgacatcacatgctgcgggagttcaccccagaagctgcttttagaggcctgcggattcttaactgccgctgccgcaccggatgcgccaggcacaacggttgcactgcgttttttaatggccataacaattatccctgtcgaatattactgttgttcagaggcaatcatctcttcgatttctttgatgatgcccgcagcgtttttaattgcgtcctgcaaagtgatttcataaacgtcgtgtgattcgaaacgttcgttatcttccggggtaactgccacggagtggatgatgatggtcgcttcggcgatatcctgcgccgtcaggcgattctggataccgtccgcgccctgggtttcaattttcacttcataaccggcttctaccgccgcttcttccagcgcctgagcggccataaaagtgtgagccaggcccattgggcaggcacataaggcaatcagtttcttactcatcgttaattcctcgttcagtgatagttgacgagtgaaattatgaacgtgcaaaacaaatcgccgttaccagacaaataatgcatttactggagaattaatcccgctgtacggaagtgtgacgcaggtcggccttgtgaggggacacaaagaaaagttgaattaactgtatgatttaaaanattatcgggagagttacctcccgatataacaggaaggatttacagaatgtgacctaaggtctggcgtaaatgtgcaccggaaccgagaagacccggattgtcatggacgatgagatacaccggaatatcatggacatattctttaaagcgccctttatcttcaaatgcggcacggaaaccagaggctttgaagaactcaaggaagcgcggcacgataccgcccgcaataaacacgccgccaaatgtcccgagattgagcgccagattgccgccaaaacggcccataatgacgcaaaacagcgacaacgcacggcggcaatcggtgcagctgtcagccagcgcgcgttcggtaatatcttttggcttgagattttctggcaggcggttgtcggctttaacaattgcgcgatacaaattcaccagtcctgggccagaaagcacgcgttccgccgaaacatgaccaatttccgcacgcaatatttcgaggataatggcctcttcttcactattcggcgcaaaatcaacgtgaccgccttcgcccggcaagcttacccaacgcttatcgacatggaccagatgcgcaaccccaagccccgttccggcaccgtaaaccgcaataggcttaccttctaccggttctgcgccaccaaactgaatcagatgctcttttttcagcatcgggatcgccatcgatacagcggtaaaatcgttaataatttccagatggctaaaaccgagattctttttcatttcggcaattgagaacgcccaggtatggttggtcattgccacccagtctccggtaatcgggcaagcgatggcaatacagccgtctttcacctcgaccttatgttcttcaagataaacgcgaatgaccgcttcgaggctggggtaatcaagccctgaataggtcttagcctgcgagatttcaccactggcaatatcacacagagcaagacgtgcgttggtgccgcccacatcaccgactaatgcatactttgtcattcttcaactgctccgctaaagtcaaaataattctttctcacactgtaaatacctgggggcataacaacaacgccggaaaggcaggctccctgtaaatatcgatctgggtcacacaattactttatcgtttcagcaccaattgcagcgatgcctttttgcaagctgggcaaactaagtatctgaccccgcataaggaatagaacatgctccatccgcgagccagaaccatgttgttattatcgctccccgccgtggcaattgggattgcgtccagtcttattctgattgtggtgatgaaaatcgcctcggtattacagaatttgctctggcaacgactgccgggaactctggggatagcccaggattcacccctctggatcatcggtgtattaacgctaacgggtattgcggtggggttggttatccgtttcagccagggtcatgccggaccagaccccgcctgtgaaccgctgatcggcgcaccggttccgccctctgcgctaccaggacttatcgtagcattaattctcggtcttgctggcggcgtcagcctggggccggaacatccgatcatgaccgtcaatatcgcccttgcggttgccattggcgctcgtctgttaccgcgcgtcaaccgaatggagtggactattttagcctctgccggaaccatcggcgcgctgtttggtacacctgttgcggcggcgttgatattttcgcaaaccttaaatggcagtagtgaagttccgctatgggatcgtctttttgcgccgttaatggcggcagcagctggtgcacttactaccggattatttttccatccccatttttcactgcccattgcgcattacggacagatggaaatgaccgatattctcagcggtgcaattgtcgcggcgattgccatcgcagcagggatggtcgccgtatggtgcttaccacggttgcacgcgatgatgcatcaaatgaaaaatccggtgctcgtgctgggtattggcggatttattctcggtattctgggggttattggtggaccagtttcgctgtttaaagggctggatgagatgcagcagatggtggcaaatcaggctttcagcaccagcgattactttttgctggcggtaattaaacttgccgccctggtcgttgctgccgccagtggctttcgcggtgggcgaatcttcccggcagtgtttgtcggcgtggcattagggttgatgctgcatgagcacgttcccgccgtaccagcggcaataaccgtttcctgcgctattctcggcatcgtgctggtggtaacacgcgatggctggttaagtctttttatggcggcagtcgttgtacccaataccacattgctaccgctgctctgtatcgtcatgcttccggcatggctgttattagcaggtaagccgatgatgatggtcaatcgtccgaagcaacagccaccccacgataacgtttagcaaaaaatgctctcctttatgatttaagagttatggcgatgatacggggctttacctccccgtaatattgcgttaacaggccgctgacggcttcgatcgtgaaggagaataacaatgttcaggtcactgtttctggcggccgccctgatggcatttaccccgcttgcagcaaacgcaggcgaaatcaccctactgccatcaatcaaattacaaattggcgatcgcgatcattacggtaattactgggacggtggtcactggcgcgaccgtgactactggcatcgcaattatgaatggcgtaaaaaccgctggtggcgtcatgataatggctaccatcgtggctgggataagcgtaaagcatatgagcgtggctatcgtgaaggctggcgcgatcgtgacgatcatcgcggaaaaggccgcggacatggacaccgccattaaacacattcgccaatggagcacaaggcctgatgcgacgctagtgcgtcttatcaggcctacaaaccggctctttaacgcgtagggcggataaggcgtttacgccgcatcgccaatagtgccagatgcgacgctcattcaactacaatcccagcgccgtccccaccaataaccagatattcagcgccacgaccagcactacaatcacccagcctgtctgttttacncntttgctgttcaccagatcgcccatcaacttgctgtcactggtgaaaatcagcagtggaaccagcgccagggcgataccaaaacttaacagcacctgactcataaccagaatccgtgtcggatctaatcccatcagaatgacaataaatgacggcagcatggtgactgtacgacgcacccacagcgggatatggaagcgaatgaacccctgcatcaccacctgccctgccagtgtccccaccaccgttgaggacagtccggcagcaaccagacttaacccaaagaccgttgccgcagcatggcttaacagcggttgcagcgtcaaataagcctcatcaagatcggcaacaccagtatgaccagaaaagtggaacgccgccgcagctgtagccatcatcgccagattgacaaaaccggcaatagtcatggcgatagccacatcccatttggtggcggaataacgttgttgacgcgaaccgccatgtaaatgctgagtgagcgaagagtgcaaataaatcacatgcggcataatcgtcgcccctaacacgcctgctgccaggaagaccgcctccgaagtaggtaaactcgggatcaccattcctttacccagctgcgccaggttaggctgggagaaaatcaactcgacaatgtaagccgcggcaacaaacaacagtaacccgccaatcactttctccagcggtttttgcccgcgacgttgcagcattaaaatcaggaaagtcgcgatccccgtcagcaccgcgccctgcaacaacgaaacaccaagaatgagtttaaaaccgatcgccgcaccaataaattccgccaggtcggttgccatcgcaataatttctgcctgaacccaatagaaccacactacgggacgcggatagtgatcgcgaatctgctccgccagatttttaccggtggcaatccctagtttggcagagaggatctgaatcagcatcgccatcaggttggcccaaacgacaacccacagtagctgatagccgaagctggcacccgcctgaatattggtcgcaaagttaccgggatcgatataaccaatcgccgcaatgaacgcaggtcccattaatgcgagcctcatcttgcgcgccgcccgtccgctgctactctcaacgcgatagttcgtcatcttgtgcctctaaaacatagcctttgctatgtttcatgctatgccaaacgagaatgattatcaaattcatttaaatgggttgtggtgatttctctgatagaccaggattatgactacgaaaagattgatgacttgaatgttatggttatgtttaatgttagcacatttacataactttcagcttccatacacaacatagcagaaatgtatgacagctcactatttttgaagcttgtcacaggacgtcattatagtgtgtgtcagatctcgttttccttaaccatgttacatagaatgtgcacggaaatttaacctgcctcatatttggagcaaatatggaccgcgtccttcattttgtactggcacttgccgttgttgcgattctcgcactgctggtaagcagcgaccgcaaaaaaattcgtatccgttatgttattcaactgcttgttatcgaagtgttactggcgtggttcttcctgaactccgacgttggtttaggcttcgtgaaaggcttctccgaaatgttcgaaaaactgctcggatttgccaacgaagggactaacttcgtctttggtagcatgaatgatcaaggcctggcattcttcttcctgaaagtgctgtgcccaatcgtctttatctctgcactgatcggtattctccagcacattcgcgtgttgccggtgattatccgcgcaattggtttcctgctctccaaagtcaacggcatgggcaaactggaatcctttaacgccgtcagctccctgattctgggtcagtctgaaaactttattgcctataaagatatccttggcaaaatctcccgtaaccgtatgtacaccatggcagcaacggcgatgtccaccgtttctatgtccatcgttggtgcatacatgaccatgctggaaccaaaatacgtcgttgcagcgctggtactgaacatgttcagcacctttatcgtgctgtcgctgatcaacccttaccgtgttgatgccagtgaagaaaacattcagatgtccaacctgcacgaaggtcagagcttcttcgaaatgctgggtgaatacattctggcaggtttcaaagttgccattatcgttgccgcaatgctgattggctttatcgccctgatcgccgcgctgaacgcactgtttgctaccgtgactggctggattggctacagcatctccttccagggcatcctgggctacatcttctatccgattgcatgggtgatgggtgttccttccagtgaagcactgcaagtgggcagtatcatggcgaccaaactggtttccaacgagttcgttgcgatgatggatcttcagaaaattgcctctacactctctccgcgtgctgaaggcatcatctctgtgttcctggtttccttcgctaacttctcttcaatcgggattatcgcaggtgcagttaaaggcctgaatgaagagcaaggtaacgtggtttctcgcttcggtctgaagctggtttacggctctaccctggtgagtgtgctgtntgcgtcaatcgcagcactggtgctgtaagaccatacataaaaaagccggggataattccccggcttttttacgcctgttaatcagctaatggctgcgggcgaccaatcaaatacccttgcagatattgcaccccgagcttatgcaatagcgcctgttgctgttgcgtctcgacaaactccgcgaccacactcaatgacttcgctttcgccagatcggtaattgatctcacaatcatcgcatccagcgtattcgtgacaatatctttcacaaagacgccatcaattttgatgatatcagcctgcaaacgctttaaccgttcgtagttggcatagccggtgccaaagtcatcaatcgcaatccggaaaccaaacttatgcagctgctcgatgttgtacatgctgctttctgcgttagaaaacgcctgctcctcggtgatctcaagaatgaccgcctgcggggagatgtgataacgcttaaatagacgaataatccgcccggcaatattcttttgcagcagcgtgagcggcattaaattaactgaaaagcgcgggccttttttgtcgcaagggtgtgttgccagccacttcaacaaggattccagcacttgcaaatcaaaacgcgcgctaaggttaaactgagcaataaggggcagaaacttatccggggtcataatgccgccgtcatatttcagtcgcncgaggacctcatcataaccttcaccctctttgttgcgaattggctgggcgtagagcagcaaatcaccctgatctaacgccgtgcgaatggtattcagcaatagcacctgtttagtggtctgcccggaaaccatctcctctcggctatccagcgccagcacatgatgatgtgcgcaggattgctccgccagccagcttaactgccccaacaagggttgcagggtttcctgatttccatcaaaacgcccccaggcagcaccatagcccatatccagcccggtattgttccagtgaatttgccgactattcaggatgttaaccatatgctggagtcgcccttccgtttcaggcccgctcagcactaacagcagttcactacccggcaattgatacaacttttcgttttcctgcatcaatggcagcagcgtacggtaaattgatcggatacagtgaacacgcatcatcaacccgtaatgacgactcataaactcaagattatcaatgcgcaggcagcaaaaactcttgcccgcctcttgctccggcgcttgttccaacgcacgaaagttgggcaggagcgttaacggatcggtcagcgcctgcaaatgccagcggcgattaagccattcactgcgatgataaatgcgcaccatatagagcaggcaaacgctaaaggaaatcagcaccgcgagaataaatgccagcgaatattcggtttcccccccttgcaaaaagttctggttgtaattcagcaggcaaagcgttgaaacagcccaagtgagatttaaaaacggatagcgaagcttaccgaccccgagggtaaagatgatgaagaaaacgggtaccaggtaaccggcaataaagtcgttttcataaggtgtgcacaacagaagtagcagcacgcttaacgctgccagccagcttaaggtaaatgcgcgtttctctttgcccaacgacggagcgatatccctgcgccacaatatctgcgcaaagtggggacttacaatcatgcgagtgagatagtagaaaagcatgttgtaaatcagcacagcggtgaaaaggcttagcaaatcaacgaccgtgaaaatggcatccgcatcgccgaaaaaggtggatatctttagcgggaaatcaaagaagctccccacaagatacatgctgcatttgatgccgatcggcgtcaccaaaccaagccagaacagacgttgccagacatatcggctggtcaatccataacgccaacgcgtccccagctgccagcgtaatattgcgcaggcacacaacacgacaaacgtctggctaccgagcatgaccgcagtctgtaaaaaagagagatgaaagttccacagattggtgcaaaacatcccgcataaaacgggaacgacaccgcgccagccaaagataaacaagattgacagcattacgcacagtggcatccacgccagaaagatataactggaatggataatggcaagtggcgaaataaaacgggatagctgaataagtaccacggtgagcgtaaacgctagtgtgaatatcttgatattttttatcaggttatgctccacaaacatgagtacactactctcactgatcggggttttcaggcacacaaataataagtttattcgcattgcgaagcaaacaggggccatcctgttgccgatttttcatccaatgatgctttcaccaggcggcactaacccggacgtagactgtattacaaaagcggcaaaaagcagagacaaaaaacccccgctttgcagcgagggttggaaatttggtggagctaagcgggatcgaaccgctgacctcttgcatgccatgcaagcgctctcccagctgagctatagccccgtcacgtaaagcttgtcgagttgacgggcggcatcatatgaattccgcccgaatgtgtcaacggcaaattgcaacgtgtagtttcaatcgctgaaaaatcaggcaaatgaacaattttggaaaaccgctcgcattcagtagttattcatgtcacggtttcctgtaaagtggtgctataaaatgaactactaatagacccacatacattcagggaattgttatgttcaaggagaggatgacaccagatgaacttgccagactgaccggctatagccgcnnnnnnnttaataaatgggtacgcaaggaaggctggacaacgtcaccaaaacctggcgtccagggtggcaaagcccgactggttcacgtcaatgaacaggttcgtgaatatattcgtaatgctgaacgtccagaaggtcagggagaagcgcctgccctttctggtgatgcgccgcttgaagtattgctggtgacactggcgaaagagatgacgccagttgaacaaaaacagtttacatccttgcttctgcgggaagggattatcggattgttacaacgcttagggattcgcgatagcaaataatatgaaaagattacgcaataaaatgaccaccgaagaactggctgaatgcctcggtgtggctaaacaaactgttaaccgttggatcagagaaaaaggctggaaaacggaaaaatttcccggcgtgaaaggcggtcgtgccagacttattctggtcgatacgcaagtttgcgagtttattctgaacacgccagccttccataacacaccgatgcttctggaagccgaagaaccccttgccgaatacgcaccggggattcgcactcctgcttatcggcaaatcatcagtgcaatagacaacatgactcacagtgagcaggaaaaagttgcgcaatttttgtcacgcgaaggaattcgtaatttccttgctcgtctcgacatagatgaatcagcttgacatcctccacgccctgaatgacgaggatccctgctacgttcaggctgtcgcctgaatcatttcggtgggttcctgcttcaacgagcggcctgactgcaccatctctccacaggcaagaacggcgtgccncgccgctaaaatgttacgagcgccgtttacatcggcgttcgctgtatatccacatacctggcatctgaatttactttgtgacaggcggttttctttcgctgtatgaccacagcacgcgcaacgctggcttgtgtacgctggcggaacagccagnacctgaccgccacgccagagctgcttgtactcaagctggcggcgcatttcataccagccctgatccagtatcgaacggtttaaacctgattttgcccggacattgcgccccggctggctgaccgtacccgctgctgactttgacatgttgctgaccttcaaatcctcaatgactatcattgcgtggtttttgctgacggtcgttgtgactttgtgaaggtagtccctgcggatatttgcggtacaggaatgcagtcgctgtattttgcgtttctgcttctgccagttattgctgaatttgaccttgcggcttaactgtcgctgaagtctcgccaacttcttctggtttttctgaaaactgtttacaggctcaaagactgtgccatctgacagcgtggcgagtttagccacgccagcatccagtccgaccattgatgctgaagggtgaaccggagttgatacttcactttctgtctgaatactgatgtaccacttaccgcaggactggctgacagtgacatttttcacaacacccgtgacctgacggctattccggtagcgcatccagccaagtttcggcagaaaaatacggctgttttcctgatcgagcttaacgccctgcgggtagcggaatgcatcattctgtccccgctttttgaatcggggaaaagcagcccncttccggaagaagtttttgtaagcccgctcaaggtctttcagtgactgttgcaatggctgtgacggggcatctttaagccattgcgtttcagtggcatttttccactcaaccagccaggaagccattttcccgtaagggatgtatttattaccggcctcatgattctcattctgaagcgccagagcacgattgaaaacgaaacgacatgcgcctgcgaagcgcctcatttcacgctcctgttgaccaccgggtcttaactggaatttaaatgcctgtagtcgtttcacaggccaaatgatactttggtctgtgaaaaaagaaaccgatatccggcgtggaaggcattgtgttttcctgatgcatgttcatctgttctttgtcaccagataccgacgtcagatttttgactatgacgcgacagaaaaactacgcacttacttttcaaatgtatgtgctgattttgaagctgaactggttgaaatggatggcgaaccagatcacgtccatttgttaactaactatcctcccaaactggcgatatccagtctggtaaacagcctcaaaggcgtatcgggtaggttactgcgacgagatcgaccagatattgcagtcaggtattactacaaaggcgttttgtggagtcctggctattttgccagtagctgcggaggtgcgccaatatccgtcatccgccaatacattgaacaacagcaaacacctggtcaggtggaaaaccgcgccttatatccccgccctgaaggacggggttttacggcgcaccggataaataaaaaacggcaggggtatctctcctgccgtttatcttttatgcgctaattactgctgattttcgcgttccgcaataaaagccagcgctttgttgatacgctcgatactgcgggtcttaccgatcgcgtgaacggtaacgtccagcgccggagactgccccgcaccggttacggcgacacgcagcggcataccaactttacccatacccacttccagctcatccgccgtcgcctgaatagcgtgatgaacgttttcagctgtccagtcagtaatcgcggccagtttgtcacgaaccacttccagcggctgacgcgctaccggacgcagatgttttttcgcggcgtcggcatcgaactcagcaaaatcttcgtagaaataacggcagctctgtgccatctctttcagcgtcttgcagcgttcgcccagcagtttcaccagatcagccagctgcgggccgttacgggtatcgatattttcctgctcaatgtgccactgtaagtgagtagcaacatactccggcggcagcgcgttaatgtagtgatggttcagccacagcagcttgtcggtgttgaacgcactggcagatttgctgacggcattcaaagtgaagtatttgatcatctcttcacgagtgaagatttcctgatcgccgtgggaccagcccagacgcaccagatagttcagcagtgcttctggcaaataaccgtcatcacgatactgcattacgctgactgccccgtgacgtttggacagttttttgccgtcatcgccgttgatcatagaaacgtgcgcgtaaaccggtaccggcgctttcagggctttaagaatgttgatctggcgtggcgtgttgttgatatggtcttcgccacggataacgtgggtgatttccatatcccagtcatcgacaaccacacagaagttataggttggggaaccatcggtacggcggataataagatcgtccagttcctggttgctgaactcgatcggaccacggatctgatcgtcaaaaacaacagaaccttcctgcgggttagcaaaacgtacgacacacggctcatcatcagcgtgatgctcatgactgtggcggcagcgaccgtcataacgcggcttctcacctttcgccatttgctcttcgcgcagcgcttccaggcgctctttagagcaatagcatttataagctgtgccctcttccagcatctgatcgatcaccgcgttgtagcgatcaaaacgtttggtctggaagtacggaccttcatcccactccaggctcagccagttcatgccatccataatggcttcgatagcttccggcgtggaacgctcaagatcggtgtcttcaatacgcagcacgaactcaccgccgtgattacgtgcaaaaagccaggagtaaagagcagtacgcgcgccgccaacgtgcagatagcctgttgggcttggcgcgaagcgagttttgattttcatgaaatggccttacgtttagaaagatgccgacaaccggcaaatcntggaaaaattgagtgggcgatattctatcactcccgcctgattcctcaatgtagttcgggttgcaaccttacgcattattgttttcgttgacaaattgcgcaacacggtctgttttgcgatcatcttgcttaaatttacgacgaacgaacaatttctttagaaaatgcgttgactcattttgaactctccctataatgcgactccacacagcgggggtgattagctcagctgggagagcacctcccttacaaggagggggtcgnnggttcgatcccgtcatcacccaccaactactttatgtagtctccgccgtgtagcaagaaattgagaagtgggtgattagctcagctgggagannnnnnnnnnnnnnnnnnnnnnnnnnnnnnnnnnatcccgtcatcacccaccactttctcaccagctaaatttcttgtaaaaatgtgaagtaccgaagtgggtgattagctcagctgggagagcacctcccttacaaggagggggtcggcggttnnatcccgtcatcacccaccacttcgggtcgttagctcagttggtagagcagttgacttttaatcaattggtcgcaggttcgaatcctgcacgacccaccaatgtaaaaaagcgccctaaaggcgcttttttgctatctgcgatttgtaagattgatttttcttctcaagttccttgttcttctgccgatattacctcgtacagtgacgaggactgaacaatggccactatctcttcaacttcaattccttccatacaaacacagagtagtaacagggcatcacaaggtagcgatgttgcttcacaaatcgcgcggataagtcagcaaatcatcaaactcactcaacacattaaagagattgtagacactagcggcagtgctgaagacaagcaaaaacaggccgaattgattcaacagcaaatcaccctactggaaacacaactggcgcagttgcagagacagcaggcagaaaaggcgcaggagaaagagcagcgtttgtctctgaatgtatcccttctaaatcctgttgaaaatacgactcatatcggtatctatatctgatacaacggatccccttcccgcccagccattagcgtattgccctggtctcgtaccacgtcccataacgcttcagcggcggtggaaagtgaacggtttttcctgcgcaccagcatcaactggcgttccaccaccggcgtaatgcgctttaccaccagcgggctaccttcaggcaatggtagcgccagtgcgggaagaatactgatgccgatgcctgcggctaccatcgggaacagcgtcgccggatgtccaatctcctgcacaatattcgcctgaataccattgcgcgccagcgctgcgtcaatcagcggtcggctgcctgacgcataatcctgcaacaccaatttcgctccctgtaatgcctgccagggtacataatcttccgcggccaaagcgctatcccgatggcaaagcagaaagaaaggctcggaaagaatcacttcacattgcagatcgcccactgggcctggatcgatgacgatgccaaagtcgacatctccctggcgaatactttccatcacccactgctgcggacgatcgtgcaggacaaactgaatatctggatagcggcgatggctttcagcaatgcattgcggaataagatgcgcggaaatggtctggctggcagcgacccgaacttttccgctcagttgttgccccatacgcccggtatcgcgcaacgtgctgttaagttcatccagcagtcgctcaagacgcaaagccaactgctgccctgcatctgtaagcaccacttcacgcgtggttctgtccagcaggcgaacaccagtatgattttccagctccttcacactgtgacttactgccgactggctcaggccgatacgctctcctgcacgactaaaacttttctcctgcgctactgtgacgaaaacctttaattgttttaaagaataattcatctgttttcttcatgaatggatgcaataaatcaattttatttctcaaactggaagaagcacaatagaaccatcgatcatctggagtctttatgaaactttttcgtatcctcgatcctttcaccttaaccctgatcacggtggtgttgctggcctctttctttcctgccagaggcgatttcgtccccttctttgaaaatctgaccaccgcagctattgccctgctgttctttatgcacggcgcgaagttgtcgcgtgaggcgattattgctggcggtggtcactggcgactgcatttgtgggtaatgtgcagcaccttcgtgctgtttccgattctgggtgtactgtttgcctggtggaaaccggtaaatgtcgacccgatgctctactccggttttctctacttgtgcattctcccggctaccgtgcagtctgcaatcgccttcacgtcaatggcgggcggtaacgtcgcggcggcggtttgttctgcgtcagcatccagtctgctggggattttcctttcaccattgctggttggtctggtgatgaatgttcacggtgcagggggcagccttgagcaggtcggtaaaattatgctgcaactgctgctgccgtttgtgttggggcatctttcccggccgtggattggtgactgggtgtcgcgcaataaaaaatggattgcgaaaactgaccagacgtccattctgttggtggtttatacagcgttcagcgaagccgtcgttaatggtatctggcataaagttggctggggatcattgctgtttatcgtggtggtcagctgcgttcttctggctatcgtgattgtagttaacgtctttatggcacgccgactgggcttcaataaggcagatgaaattactatcgtcttttgtggttcgaaaaagagtctggcaaatggcatcccgatggcaaacattctgttccccacatcggtgatcggtatgatggtgctgcccctgatgattttccatcagatccaattgatggtctgtgcggtgctggcgcgtcgatacaaacgccagaccgaacagttacaggcgcagcaggaaagcagcgccgataaagcttaaagcggacgcttcaggggctggaccagttgcgtcagcccctcggttttaatcagcagcgtgatttgcattagctcaccgagcttccctgccgggaactcatctttgcgggcaaaccacagcagatactcctccggcaggtcgattaagcgacgccctttgtatttgccaaacggcattatcgtattggctatttcaatcagctgctctttttccatctcagctacccagcaaacgcagcatttccgcttcgtcgatgacttcaatgcccagttcctgcgccttcgccagtttagatcctgcagcttcacccgctatcaccagatcggttttcttcgacacgctgcccgcgactttcgcgcccagttcgaccagtcgagctttagcgtcatcacgcgacatctggcttaagctgcccgtaagcaccacggttttaccagcaaacgggctgtcaatctcttccgcgttgataacgatcggcgcangccagtgaacaccttccgccaacagctcgctgatgacattgcggttgctttcttcggcaaagaagttgtgaacgtgggatgcaacgacaatgccaacatcaggcaccttttgcagctcttcaatcgaagcggcttccagcgcttccagcgttccgaaatatgccgccagacctgctgcggtggcctcgccgacttcacggatgccaagtgcatagaggaagcgagcaaaggtggtttctttcgctttttccagcgcgttaaccacgttttgtgccgattttggccccatacgctccagtccggtcagtttgcctgcggtgagtttgaacagatccgccggagtgtggacatattctttttcaaccagctgatcgatgattttgtcgcccattccgtcaacatccatcgcacggcgggaaacaaagtgtttcagcgactctttacgctgcgcaccgcaaatcagaccaccggtacagcgggcaaccgcttcaccttccacacgctcaacgtcagaaccacataccggacaatacgtcgggaatacaacctcacgggtatcttccgggcgttcagaaagcacgacgttaaccacctgcgggatcacgtcgccagcgcggcgaatcaccactttatcgccaatgcgtaaaccaagacgttcgatttcatccgcattgtgtaaggttgcgttactcaccagcacgcctgcaacatggacaggttccagacgcgcaacaggcgtaatcgcgccagtacgcccaacctgaaactcgacgtcacgcacaaaggtcatctgttcctgcgccgggaatttaaacgctaccgcccagcgcgggnctcgcgcgacaaagccaagctgctcctgctgttccagtgagttgaccttaatcaccacgccgtcgatatcaaagcccagcgtcgggcggtcttcttccncntngngatagaacgccagcacttcttccgccgattcacaaagcgttacccgatcgctgaccggcaacccccactttttaaattgcagtaaacggccaagatgagtatccggcagctcgccaccttccagaacaccaacgccatagcagaaaaaagtgagcggtcgcttcgctgtaatacgcggatcaagctgacgcagtgaaccagctgccgcattacgtgggttagcaaacactttcccgcccgtgcgtcgcgcatcttcgttaatcttttcgaaccccgcctgcggcaggaacacttcaccacgcacttccagacgcgccgggatattctctccgtgcaacttcagtggaatggcgcgaatagtacgcacattagacgtgatatcttccccggtggtgccatcgccacgagtcgcggcactgactaaaacgccattttcatacagaatactgacggcaaggccatccagcttcagctcacagcaccaggtgactttctcgttgcttttcagacggtcctgcacacgtttgttgaaggcaagaaagctttcttcatcaaaaacgttatccagcgacagcattggcacttcatggcgaatctggctgaaagccgccagcggcgcagcacctacacgttgggtaggcgaatcaggcgtaatcagttctggatgtttggtttccagctcgcgcagttcgcgcatcagcctgtcgtattcagcgtcgggaatttccggcgcatccatcacatgataaagatattcatgatggcgaagcgtcgttcgcagttctgtcagttgttgttcgattgattccatatcgcaccatcaatgctaaaaacccccgacaagcgggggttcgaagaggagttaatttgccttaagtgtatcaggcgttggcgtctttaacttcgcggatgatgtcctggtactcgcgcaatttctgcggagtcatcatacggcgctgatcgtcaagcacgacaccgcccacttcatcggcaatatgctgcgcagattgcagcatcagcttgaagttntgcagctcgtcaccgtaagacggtacctgcataaagatagtgacacccggagtagtgaaatccttcatttcaggatcaaaggtncccggtttcaccatattcgccaggctaaataacgccgggccgctgccatccgggctaagatgacgatggtaaatattcatatcgccaaaaatgaagcccgnttgttgaatgctgttaagaagcagttcaccgtttagctcgctaccgtgatgcgccgcgacgttcatgataatcaccgcttctttgcgcttcggtttatccataactggagccggttccgctacaggctcaggctgtggtgccgctacgggttctgcaggctggaaagcctgttgtgccggttgcggtgctgaatgcactggctgcggcgctggcgcgacctgtggcgaaactggctgctgcaacggctgttcaggctgcggctgataggcaggctgctgcaccggctgcgctggacgcggagcatgttgcggcggtacctgcgcttcaggcggctgctggaccggttgacgcggctgcgcagacgcataaggcggttggtactggtgttgcggcgacggacgagcagcctcatgctcctgngcgttagccggggcatgattcacgcggtgaacacgaacctcaccaacgccctcatcatcttcgacatcctcgtcataagaatcgtcgtcacgttttgacttcattcgttttaatggccgatcgcggaacatagaagatcgttctttacggctggtccagaaaccatgtaccagtaaagcgattatggcgatcgcgccaacaatgattaatatcagacgcaaatcctgcatcattatattctctgttgttctaacaccttgccaccacggcaaacatttactcactaagagtatttgccgattacctcaagtgcaagtgcactattaactttcacagcacaaagatagatgaaatcgtgctttttgctgttttttcgaacatatcctaactgtccattgcgcaattacccggtaaaanacgcacaattttcctgggattggtcaaaaggagctcatcctgattatggtttcatcattcacatctgccccacgcagcggtttttactattttgcgcaaggctggaagctcgtctcgcaacctgggattcggcgtttcgttattttaccgctgctggtcaatattttgttgatggggggcgcattctggtggctctttacgcaactcgatgtctggatcccgactctcatgagttatgttccggactggttacaatggctgagctatctgttgtggcctctggctgtcatctctgtgctgttagtgtttggctatttcttctccacgattgctaactggattgccgctccgtttaacggtttattggctgaacaactggaagcacgattgactggcgctacaccgccagataccgggattttcggtatcatgaaagatgtgccgcgaatcatgaaacgcgaatggcaaaaatttgcctggtatctgccacgcgcaattgtattgctaattctttacttcatccctggtattgggcaaaccgtcgcgccggtactgtggttcctgtttagcgcctggatgttagccatccagtattgcgattaccccttcgataaccacaaagtgccgtttaaagagatgcgcaccgccctgcgcacacgcaaaatcaccaatatgcagtttggtgctttaaccagtctgtttacgatgatcccgctgcttaatctgttcattatgcccgttgccgtttgtggcgcgacggcgatgtgggtcgattgctatcgcgataaacacgcgatgtggcggtaacaatctaccggttattttgtaaaccgtttgtgtgaaacagggggggcttatgccgccccttattccatcttgcatgtcattatttcccttctgcatatagatatgctaaatccttacttccgcatattctctgagcgggtatgctacctgttgtatcccaatttcatacagttaaggacaggccatgagtaagatttttgaagataactcgctgactatcggtcacacgccgctggttcgcctgaatcgcatcggtaacggacgcattctggcgaaggtggaatctcgtaaccccagcttcagcgttaagtgccgtatcggtgccaacatgatttgggatgccgaaaagcgcggcgtgctgaaaccaggcgttgaactggttgaaccaaccagcggtaataccgggattgcactggcctatgtagctgccgctcgcggttacaaactcaccctgaccatgccagaaaccatgagtattgaacgccgcaagctgctgaaagcgttaggtgcaaacctggtgctgaccgaaggtgctaaaggcatgaaaggcgcaatccaaaaagcagaagaaattgtcgccagcaatccagagaaatacctgctgctgcaacaattcagcaatccggcaaaccctgaaattcacgaaaagaccaccggtccggagatctgggaagataccgacggtcaggttgatgtatttattgctggcgttgggactggcggtacgctgactggcgtcagccgctacattaaaggcaccaaaggtaagaccgatcttatctctgtcgccgttgagccaaccgattctccagttatcgcccaggcgctggcaggtgaagagattaaacctggcccgcataaaattcagggtattggcgctggttttatcccggctaacctcgatctcaagctggtcgataaagtcattggcatcaccaatgaagaagcgatttctaccgcgcgtcgtctgatggaagaagaaggtattcttgcaggtatctcttctggagcagctgttgctgcggcgttgaaactacaagaagatgaaagctttaccaacaagaatattgtggttattctaccgtcatcgggtgagcgttatttaagcaccgcattgtttgccgatctcttcactgagaaagaattgcaacagtaatgccagcttgttaaaaatgcgtaaaaaagcaccttttcaggtgcttttttgtggcctgcttcaaactttcgcccctcctggcattgattcagcctgtcggaactggtatttaaccagactaattattttgatgcgcgaaattaatcgttacaggaaaagccaaagctgaatcgattttatgatttggttcaattcttcctttagcggcataatgtttaatgacgtacgaaacgtcagcggtcaacacccgccagcaatggactgtattgcgctcttcgtgcgtcgcgtctgttaaaaactggcgctaacaatacaggctaaagtcgaaccgccaggctagactttagttccacaacactaaacctataagttggggaaatacaatgttccagcaagaagttaccattaccgctccgaacggtctgcacacccgccctgctgcccagtttgtaaaagaagctaagggcttcacttctgaaattactgtgacttccaacggcaaaagcgccagcgcgaaaagcctgtttaaactgcagactctgggcctgactcaaggtacagttgtgactatctccgcagaaggcgaagacgagcagaaagcggttgaacatctggttaaactgatggcggaactcgagtaatttcccgggttcttttaaaaatcagtcacaagtaaggtagggttatgatttcaggcattttagcatccccgggtatcgctttcggtaaagctctgcttctgaaagaagacgaaattgtcattgaccggaaaaaaatttctgccgaccaggttgatcaggaagttgaacgttttctgagcggtcgtgccaaggcatcagcccagctggaaacgatcaaaacgaaagctggtgaaacgttcggtgaagaaaaagaagccatctttgaagggcatattatgctgctcgaagatgangagctggagcaggaaatcatagccctgattaaagataaacacatgacagctgacgcagctgctcatgaagttatcgaaggtcaggcttctgccctggaagagctggatgatgaatacctgaaagaacgtgcggctgacgtacgtgatatcggtaagcgcctgctgcgcaacatnctgggcctgaagattatcgacctgagcgccattcaggatgaagtcattctggttgccgctgacctgacgccgtccgaaaccgcacagctgaacctgaagaaggtgctgggtttcatcaccgacgcgggtggccgtacttcccacacctctatcatggcgcgttctctggaactgcctgctatcgtgggtaccggtagcgtcacctctcaggtgaaaaatgacgactatctgattctggatgccgtaaataatcaggtttacgtcaatccaaccaacgaagttattgataaaatgcgcgctgttcaggagcaagtggcttctgaaaaagaagagcttgctaaactgaaagatctgccagctattacgctggacggtcaccaggtagaagtatgcgctaacattggtacggttcgtgacgttgaaggtgcagagcgtaacggcgctgaaggcgttggtctgtatcgtactgagttcctgttcatggaccgcgacgcgctgcccactgaagaagaacagtttgctgcttacaaagcagtggctgaagcgtgtggctcgcaggcggttatcgttcgtaccatggacatcggcggcgacaaagagctgccatacatgaacttcccgaaagaagagaacccgttcctcggctggcgcgctatccgtatcgcaatggatcgtaaagagatcctgcgcgatcagctccgcgctatcctgcgtgcctcggctttcggtaaattgcgcattatgttcccgatgatcatctctgttgaagaagtgcgtgcactgcgcaaagagatcgaaatctacaaacaggaactgcgcgacgaaggtaaagcgtttgacgagtcaattgaaatcggcgtaatggtagaaacaccggctgccgcaacaattgcacgtcatttagccaaagaagttgatttctttagtatcggcaccaatgatttaacgcagtacactctggcagttgaccgtggtaatgatatgatttcacacctttaccagccaatgtcaccgtccgtgctgaacttgatcaagcaagttattgatgcttctcatgctgaaggcaaatggactggcatgtgtggtgagcttgctggcgatgaacgtgctacacttctgttgctggggatgggtctggacgaattctctatgagcgccatttctatcccgcgcattaagaagattatccgtaacacgaacttcgaagatgcgaaggtgttagcagagcaggctcttgctcaaccgacaacggacgagttaatgacgctggttaacaagttcattgaagaaaaaacaatctgctaatccacgagatgcggcccaatttactgcttaggagaagatcatgggtttgttcgataaactgaaatctctggtttccgacgacaagaaggataccggaactattgagatcattgctccgctctctggcgagatcgtcaatatcgaagacgtgccggatgtcgtttttgcggaaaaaatcgttggtgatggtattgctatcaaaccaacgggtaacaaaatggtcgcgcctgtagacggcaccattggtaaaatctttgaaaccaaccacgcattctctatcgaatctgatagcggcgttgaactgttcgtccacttcggtatcgacaccgttgaactgaaaggcgaaggcttcaagcgtattgctgaagaaggtcagcgcgtgaaagttggcgatactgtcattgaatttgatctgccgctgctggaagagaaagccaagtctaccctgactccggttgttatctccaacatggacgaaatcaaagaactgatcaaactgtccggtagcgtgactgtgggtgaaaccccggttatccgcatcaagaagtaattcttgctgcagtgaaaaanggnncccatcggcgccatttttttatgcttccgccagcggcggcaaaatcaattcatcgctctcatgctgctgggtgtagcgcatcacttccagtacgcgcaaccccgcgnnnnncaccgcatcgtttaatgccttccctttcagcaaaccactgataagctgagcacaaaacaggtcgccagtccctttcaggtcggtttttacccttgaatgggaaatgacattcacgctgtcggcagtgaccaccacaaccagcatctcctgattttcttcattaccggaggcgctggtaatcaccacccattttagtgtgtctgaaagcagactttttgcggcagcaatggcactgtcgagatcgcggcaatttttaccggtcaggatttccaactcaaagatattgggggtaattccctgcgccagcggcagtaaatattgtcgatacgcttcgggaaggtcaggtttgacataaattccgctgtcaatatcgccaatcaccggatcgaccatgatcaataggtcaggatggtctttgcgtancgcagtcagccactcggcaaggattttgatttgcgatgccgttcccatatagcccgtggttacagcacgaagttggcgcagcgcatcacgctcctgaagtgcacgcaaatagccgctaaaccattcatccggaatcgcaccaccgtagaaagtgtcataatgcggcgtattgctcagcaataccgtcggcacggcaaagacattcaggccgttctgtttgatagcaggcacggcaatgctgttgcccacgctgccgtaaaccacctgcgactgcacggcgacgatatccgcctgcagcgccctgctcttatcgttaaacaacaacaaactactcatttaattttttctccttgccgatgatcctcatcgtattccaaccgaaactttacctgattctggcagtcaaatcggctattacaaaacaaggataaggtaattcagtgaagaaaatcatttgtctggtcattacactactaatgacactccccgcttacgcgaagttaactgcccatgaagaagcccgcatcaacgccatgctggagggattagcacagaaaaaggatttgatatttgtgcgcaacggtgatgaacatacctgcgatgaagcggtttctcatctgcgtctgaagctgggcaatacccgtaaccgcattgacactgccgagcagtttattgataaggttgcttcgtcgtcatcgattaccgggaagccgtatattgtgaagatccccggtaagagcgatgagaatgcacagcctttttacatgcgttaattgcgcagacggataaaacggtgcctgcgcaataatcttaaatccccgccccctgactaaaatgctcttccccaaacaccccggtggaaaggtagcgatcgccacgatcgcagatgatcgctaccaccaccgcaccagggttagcttttgccacccgcagtgctccggcaaccgcgccgccggagctgacgccacagaatattccttcccgcaccgccagttcgcgcatggtgttttccgcatcgcgctgatgaatatccagcacctcatctaccagagaagcgttgaaaatccccggcagatattccgcaggccagcggcgaatgccgggaatgctactgccctcttccggctgcaggccaacaatggtcaccggtttggattgttcgcncataaagcgtgaaacgccggtgatagtgccggttgttcccatgctggagacaaaatgggtaatgcgcccgccagtctgctgccagatttccggcccggtagtggtgtaatgggcgtaagggttatcgggattattgaactgatcgagcagctttccttcaccacgatccgccatctccagcgccagatcgcgcgcaccttccatgccctgctctttggtgaccagaatcagttccgcaccataagcacgcatcgccgcacggcgttcctggctcatgttgtcgggcatcagcaatttcatgcgatagcctttaagcgcggcaatcattgccagcgcaatgccggtgttaccactggtggcttcgattaacacatcacccggtttaatttccccgcgcttttccgcctcgacgatcatcgaaagcgccgcacgatcttttaccgaacctgccgggttattgccttccagttttaaccacacttcactgccgttattcggccccattcgctgcaacttcaccagaggcgtattgcctattgtttgttctaatgtactcacgatctctatccatacatggtgttgcctgatgcgacgcttgcgcgtcttatcaggcctacaggttacaaaccttgccattaaaaagcccggatcgcgggaagcgcctccgggcgtttaacattcactcaacctatcaggcgctttgtgcgagagcaagttcctcatctcggggttcgatacgctcgtcgccgttatacagccgcgcatgttgcagaccaacgaataaacgctcgccacgctgcggggcatcgtcgccatgcatcacgaccgtcagcggttcgttgtaccaccccagcggctgcaccactaattgggtgtagtgacctttcgggctggcttccagtacctgtaccggcagcggcgaatcgaggctggtacggcggctgatatccacttcccacgggcgcaggaagagatccaccggcccctgatacgcaggtgtgtagcccagcggccagcgatgtgcgccaacatggaactgcccgccgcgaatggttccctgcaggcggttcacttcgcccataaattcgagcacaaaacgggtcgccggttcgcgccatacctgatccggcgcgtcagcctgttcaatattgccctggctcatcacaactacacgatcagctacttcgatcgcttcttcctgatcgtgggtcacaaaaacgctggtgaattttagttcttcatggagttgacgcagccatcgacgcagctctttacgcacctgcgcatccagcgcgccaaacggttcatcaagcagcagaatttgcggttctacagcaagcgcacgcgccagcgctacacgctgtttctggccgccggaaagctgcgccggataacgatccgccagatgggcaagctggaccatttccagcaattttgtcactttcgctttgatggctgcggcattcgggcgctcgcgacgcggcagcaccgtcaggccaaaagcgatattgtcgaacaccgtcatatggcggaacagcgcgtaatgctggaacacgaaaccgactttacgatcacgtgcgtgcaggcggctcacgtcggtgccgtggaagcgaatatgcccgctggtttgatgctccagcccagcgataatgcgcagcagcgtggttttcccggaaccggacggccccagcaacgcgaccatctgacctgaaggaatatccagtgagatatcgttcagcacctgggtgcgaccaaacgacttcttaatattggcaatctcaatgctcatgattttcctcctgctgcgcgcgtttttcctgattctccaggcgccactgcaacatactctttaaaaacagggtgataatcgccatcagcgtcaacagcgcggcggcggtaaaggagccgactgtgttgtagtcctgctccagcaattcaatctgtaacggcagcgaaagtgtttcgccacgaatcgagccggaaaccaccgacaccgcgccaaactcgccaatcgcgcgggcgttggtcagcactacgccataaagcagcgcccagcggatgttcggcaatgtgacacggcggaacatctgccagccggatgcgccaagcaaaatcgccgcttcgtcttcctgactgccctggcttaacatcaccggcaccagttcgcncaccacaaacggacacgtcacgaagatcgtgaccagcaccattccgggccaggagaacataatttgcagattatgttcatccagccagccgccgagcgggccgttggagccgtagaacagcagatacaccagaccggcaaccaccggtgacacggcaaaaggaatgtccagtagcgtcagcagtaactggcgtccggggaagttaaagcgcgtcaccagccaggccagcagaataccgaacaccaggtttaccggtacggcaatcagcgcgatcatcaccgtcagccagatggcgtgcagcatatccggatcggccagattctgtaaaaccggcatcagccctttgctgaacgcctgtacgaagatataaatcatcggcaccagcaggatgaacgccgataccagcatcccgatgccaatcagaaaccatttgccccagttaatcgggcgcgcgtcataacgcttcaattgtgtcacttccgccattaatgacctaccacacgccgaccaaagcgactttgcagagtgttaattgagaacagcagcagcagagatgccgcgaggatcaccgaagcaatcgcgctcgccgccgggtaatcaaantcctgtaagcgaacgaaaatcatcagcgacgtcacttccgtcttccaagcgatgttcccggcgataaatatcaccgcgccaaactcaccaagactacgggtaaacgacaacgccacgcccgccaccagcgccggagaaagttccggcagcaccactttgcagaaactctgccagcgcgttgcgccaagcgtttctgccgcttcttcatattccgggcctaactcttccagcatcggctgcacggtacgtaccacaaacggaatgctggtaaaggccattgccaccgcaatccccagccaggtataggtgactttgatatcaaacttcgccagccattcaccgtaaaaaccgtttacagaaaagagcgaggccagcgttaaaccggcgactgccgttggcagcgcaaagggtaaatccatcagcgcatcaagcagcgtgcggcccggaaagcgataacgggttaaaatccacgccatcagcaggccgaaaacgccgttaaaaattgatgccacaaacgccgacagcagcgtcactttgtaggccgcgaccacctgcgggttggtgatcacttcccagtactgcgcccagctcatctcagaaagctgcatcaccagcgcggagagtggcagcagcaatatcaggcacacaaacagcagactggtgccgaggcttaaggtaaagcccggcaggacgcgtcttgatgaaactgcaaacattaattacgccccgccgctaacagcttgtctaactcgccgccgctggtaaagtgggttttcatcacttccggccangagccaaatttgtcttccacgcggaacagttcggtctgcgggaatttatctttcagtttgtccatgacttccgggttattcacgcggtagtaatagtcggtgatgatggtttgcgcctgcgggctgtaaagccagttcagataggcttttgctgctttttcggtaccgttggcttgcacgtttttatcgacccacgccaccgggaattccgccagaatgttggttttcggaatcaccacttcaaagccctgcgcttcgtactgtttgcggatgttgttcacttccgattcaaagctaatcagtacatcgcccaggccgcgctcggcaaaggtggtggtcgcgccacgaccgccggtatcgaacacttcaacgtttttcaggaactgagtcataaactgttcggttttggctttgtcgccaccgtcagctttatccgctgcgccccatgccgccagataggtataacgcgcgttacccgacgttttcgggttcgggaaaatcagcttcacgtcggagcgcaccaggtcgttccagtcgtggatattcttcgggttgcccttacggaccaggaagcccatggtggagtagaacggcgagctgttattcggcaggcgcgactgccagtccgccgggataagcttgcctttatcgtgcagaatttgtacgtcggtcacctggttataagtgacaacgtcggcttttaagccctgcaaaattgccagcgcctgttttgatgacccggcatgagattgttttatcgtcagtttgtcgccgccgttatctttggcccattgctgttcaaacggcgggttcagggcggcaaacagctcgcgggagacgtcataagaactgttcagcagttccgttgcctgtacatggcccgccagcagcagagaagcgaccagcgcgagtgagttctttttcagtaagttaacggccattgcgcacccttataaatttaatgactttctaatagccatcatatttataacggacgtgaaaggagtaacggttttatataccgtttggtgatttggaagttgaaaagggaataagacgaaatcctccccacaaatgcagggaggaaacagaggtgaatcagataccgacgctaaccgtctccggcagtgtgctgccgccatcaatcacattctgtgtaccggttaaatagctggattcatccgatgcgaggaaggccgccagttcgccgacttccagcggatcggcgaggcgacgcagcgggattgcttttgccatttcagtcagcaccgactctggatcttccgggttcgactggcgggcaatgctttccgccattggtgtgcgaacgtatccagggcatatggcgttaacgcgaataccagactgcgcatactccaccgccagcgattttgtcaggccaacaatcgccgctttcgttaaggcgtacgccgtttcacccggatcggccaccatatcaccagtgactgaagacatcatcacaatgcgaccatctttgcgggcaatcatctccggcagcaccgccttcgtgacgttccatacgcctttaatattgatgtcaatatggaaatcgcgatcgtcatcgctcatatcgaggaaactgcccagacgacaaacgcctgcgttattcaccaggatatcaatgcgcccttctttttccttcgcgcgtttgatagctgcggctaccgacgccgggtcacgcacatcggcgacaaccgccgtacagcgatgaccacgaccacacagttcgtccgccagcttttcgatctcaggggagatatccagcaagattaggtttgcgccatgacgcgcaaaagttctggcaattccttcgccaattccctgcaatgcgcccgtaatcagtgctgtcttgcccgtgagtttacccattttaatgctctccttgttaatacagagcgttacactccattccctctgaaaatacaggataaacaaaatattactgcggatcagctcactaattcaggaaaatctcaatccagtcgctgctttatgcatcatttcaggcgttgtgttagctcactgctgcgctgaatcattttcaatgactccacatcattgagttgcacaagaccaacaaacagtaaatcggtaacagaattttgcgccgtgcgggtagacatcgacgagctacgccattcggtttcaccggaaacggtatcgagcgtgaaatgcgccagccgccgcagcggagagtcagccagagaagtaatggcaatcaccgttgccccctgctttcgtgccgcttctgcgcacaagacaatctcttttttactgccgctgtaagagatagcgatttgtacatcgccttttttcaacgcctgggaaacggtggcttgtacgtgcgtgtcggcttcgcaggccacgcgatatccaattttcatcagtttgaacgacagatcgcaccccaccagcgccgatccgcccaggcccgttatctggataaacggtgctttactgatgacctcaatgattttttgcagccgcgcgtagtcgaacaacgcacaggtttgctccagcgccagctctttttcgcgattcaatttgcgggcaatcacttccagcgaatcatcactggtaatcgaactgtgcaggtgctgcgccgtggcattcgttttctcccggctggcactgtattcgcctattaacgccatacgcaattcagtaaacccttgtgcgccgagcttctgggcaaacttcacaatactcgactggctgatgccgagctgtttcgccatcttgcgcgaagagacggatttcagctcactcacgttggcccgcagaaagtcagcaattttttgctcgttctcggtaaattcactttccgcattgcgtattttcgtcaggtacaacatcttccactctcctgggctggcagcaaaaattccgcttaagttcttatgacgctcttcacactctgcgagtgtagactcaatgattcctttaagtctgtcaattcgggatatatgattccatacatctgcaattatttgatcgtaaatagtaaggtcaccaccgatgcaacttgaaaagatgattaccgaaggctcgaacgccgcctcggctgaaattgaccgcgtatcaacgctggaaatgtgccggattatcaacgatgaagataaaaccgtaccgcttgccgttgagcgcgtactgccggatatcgccgcggcaatcgatgttatccacgcccaggtaagcggcggcggtcgtctgatttatctcggtgcgggaacatccggtcgtctggggattctggatgccagcgaatgtccgcccacctacggcgtgaaaccgggtctggtagttggattaattgctggcggcgaatatgccattcagcacgcggtggaaggcnctgaagatagccgggaaggcggtgttaatgatttgaaaaacatcggattaaccgcgcaggatgtggtggttggcattgctgccagcggtcgcacgccgtatgtgattgccggactggaatatgcacgccagctcggctgccgtacagtgggaatttcctgtaatccggggagcgccgtttccaccaccgctgagtttgctattacgccggtggttggggctgaagtggtcaccggttcttcgcggatgaaagcaggcacggcgcagaaactggtgctcaatatgctttccaccgggctgatgattaaatccggcaaagtgttcggcaacctgatggtcgatgtggtcgccaccaacgaaaaactgcatgtgcgccaggtcaatatcgttaaaaacgccaccggatgtaatgccgaacaagcggaagcagcgttaattgcctgcgagcgcaactgtaaaacggccattgtgatggtgctgaaaaatctcgatgccgcagaagctaaaaaacgcctggatcaacacggcggctttattcgtcaggttttagacaaggaataacccatggccaaagagatcagcagtgaacttctgaacaccattcttacccgtgtcggcggaccgggaaatatcgccagttgtggtaactgtatgacgcgcctgcgtctgggtgtacatgacagttcactggttgatcccgatatcaaaacgctggaaggcgtgaagggcgtcattttgaccagtgaccaggtgcaggtcgtttttgggcctggtaaagcgcatcgtgccgcaaaagcgatgagcgagctgctgggagaagcaccggtacaggatgccgcagaaatcgccgcccagaacaaacgtcagttaaaagccaaacaaacctccggcgtgcaacaatttctcgccaaattcgccaccatcttcacgccgcttatccccggttttattgccgccggtctgctgctggggatagcgacgttaattgccacggtgatgcacgttccggcagatgctcagggcacgctacccgacgcgctgaattttatgaaggtgttcagcaaaggtttgttcaccttcctggtgattctggtgggctataacgccgcccaggcatttggcggcacgggcgtcaatggcgcaattattgccgcactctttttgctcggttataaccccgctgcaaccaccggttactacgccggttttcacgatttctttggtctgcccatcgatccgcgcnnnnnnnntatcggcgtgttgattgccgcgtgggcctgcgcccgcatcgaaggcatggtgcgccgctttatgcccgacgatctcgacatgctgctgacctcgttaatcaccctactgatcaccgctacgctggcctatctgatcattatgccgctgggcggctggttattcgaaggaatgtcgtggctgtttatgcacctgaacagtaatccgctcggttgtgcggttttagccgggctgttcctgatcgccgtggtatttggcgtgcatcagggctttattcctgtttacctcgcgttaatggacagccaaggattcaacagcttatttcccatcctttcgatggcaggcgcgggccaggtgggcgcggcgctggcactctactggcgggcgcaaccgcacagtgcattacgcagtcaggtacgcggggcgattattcccggcctgctgggcgttggcgaaccgttgatttatggcgtcaccctgccccgcatgaaaccgtttattaccgcctgtttaggcggcgcggcgggcggtttgtttatcggattgatagcctggtggggtctgccgatgggcttaaacagcgcctttgggccgtctggtctggtggcgctgccgctgatgacttcagcacaaggcattcttccggcgatggcagtctacgctggcgggattctggtggcatgggtttgcgggtttattttcaccacgctttttggctgccgtaacgtcaatctggactgatatcatgaaacggacaatgctctatctttctctgctggctgttagttgtagcgtcagcgccgcaaaataccctgttctgacagaaagttcgccagagaaagcagggttcaacgtcgaacggcttaaccagatggatcgctggattagccagcaagtggacgccggttatcccggcgtaaacctgctgattataaaagataatcagattgtgtatcgcaaagcctggggagcggcgaaaaagtacgatggcagcgtattgatggcgcagcctgtaaaagctaccaccgggacgctgtatgacctggcctcaaacaccaaaatgtatgccactaacttcgctctgcaaaagctaatgagcgaaggcaaactgcatcctgacgatctgattgcgaaatatatttcggggtttgccgatagtccaaatgacaccatcaaaggcaaaaacacgctgcggatttctgacctgctgcatcacagcggcggtttcccggcggacccacaatatccgaataaagcggtcgcgggcgcgttatattcccaggataaaggccagacgctggagatgatcaagcgcacgccgctagagtatcagcccggcagcaagcatatttacagtgatgtcgattatatgctgcttggatttatcgtcgagtcggtcaccggtcagccgcttgaccgctatgttgaagagtcgatttatcgcccgctcggcctgacacatacggtatttaacccgctgctgaaaggctttaaaccgcaacaaattgccgccacggaattgaacggcaatacccgcgatggagtgatccacttcccgaatatccgcacctccactctctggggtcaggtgcacgatgaaaaagccttttattcgatgggcggcgtttccgggcacgcaggtttgttttccaataccggcgatattgcggtgttaatgcaaacgatgctgaacggcgggggctatggcgatgtgcagctgttcagtgcggaaacggtgaagatgttcaccaccagctctaaggaagatgccacttttggcctcggctggcgcgtgaatggtaatgccaccatgacgccgacgtttggcacgctggcaagcccgcaaacctacggtcacactggctggaccggaacggtgaccgttatcgatccggtgaatcatatggcgattgtgatgttaagcaacaagccacattcgccggttgccgatccgcaaaagaatcccaatatgttcgaaagcggtcagctgccgattgcaacgtatggttgggtagttgatcaggtgtatgcggcgttaaagcaaaagtaataaaaaggccagtcagtaatgttactgcctggcctttaatcaatgaatcagaaacgcttacagcgccatcaacttgtccagcgacggtgcgaaataatagccgccggttaccggtttggtgaaacgcaacatcgcatcacgcttaccatcggtatcgccaaacatgctcagcagttgctgctcaatgttatgcagacgcgcgcagtaggcgcagaagtacagaccgtgagtgccactggcggtgccgtacggcaggctctggcgaacaatcttcagccctttgccatcttctttcagatcaacgcgggtcaggtgagaggtttccggacgttcgtcgccgtcaatctcttcgttggcctctttggtgcgcccgatcatcatctcctgatcgtgaacgctcatccggttgagctgcttcaggttgtgctcccaacgctgcacaaacacatagctgccgccggcatccacgccgtctttgataaccgccacttcgcgacgcgtctcttcacccgccgggttttctgtgccgtcaacaaagccgctcaggtcacgctcttccacccaacggaagccgtggatctcttctttcacttcaatgcagtcaccaaaggcttccatcgccgcctgggcgacagagaagtttacgtcgtgacgcagagaaagaatgtggatcaacacatcgaactgggtggtcggcgcaaggcctttaccgtagcccggaaaatctttcagntcttctgccccaacgccgccgctcagagcgcgccagatgttgttaccaaaggcaaccaccgcaccaagatgcgcgtccgggaatttcgcttcaaaagttgccagtttgtcggcaaatgttttactggccgcacgcagggcgtcaacttcccctttcacgttggcttcgatccaaatcgccgcgcggcaatgttctggcaaaatgccactctgaacctgagacattgttcctcctgaaaataataatgccacgcaatccgtggcattgttgagcgctattttacgtgttttttcgcggcggcggtttgttcagacgcaaattaacgccgccagataattttactgactttccagtttttcagggtatcgtccgaaggcattaacccttcaggaccactccattccccgctgaactggtagctaatatgttgactgccttcggctttacattcgacggcacgattatcatcaccatcagctttttggcaattgccaaatgctttgctgtaaaggtcgctaaacggtgtaccgattttaacaccggtgtcagcaggaatatcgctatccagcacgtcaatgcgactgatcgtgccttgatcgccgttaatcaccatcgccacgttgtcgcccttcatcacttcaaaaaagcgcaccacgttgccgttcgcggttttcattccgctgcgcaggcgataatcgccatcaagcgcatcggcaatggcttgttcttgcagtggtgtggacgccgttaattcaccaacgccctgctcgctcactttggtggacgacccaaaccagttccacgggttagcggcagaccagttaactgacgacatcgtggaacagccggtcagcatcaatggcatagcgcataacattaaacgcagcgatttcatgtcacttcctttggttattcaataacgttgcttggagtgcaaattcaccaaaaagtgccgttattcttttacttcattaaaacaagcgcgtaaacgtcgattggtcagcagccagattaacgccacaatatccgccactaccagcgccagaccgataccgctaacggattcaccgttcagccacagccacggttgccagcaaagtaaaaccacctgcgccaacagcaacagaaaatagagtacacgccaggtgcgaggaaacgtagcccgccgaccgctcaacaaaaacgccagcaccgccggaatgccaggaatcagccccagccagaaattatcgtgatcgggataaaacagatttagcagcgcagtaccctgctcgcgcgacgcaccggcaatgacaaacagcacccaggttcgcgcctgaagcaatagcacaagccagaagagcaagggtaaacgcaggcgaccgtgcgcatcataatggacaggatgaaactcagtactcttcatcttcaatcaaacgcttacccagactcagcacgtcggcgtgttcatatcccaggcgttcatacattccgagcaccatgtcgttatcttccggcacgttgatctgaattttcgggcagccgcgagcaatcagctttttctccagccggttaagcaacgcattggcaatcccacgcccacgaaactctggatgcacgccaagataataagcagacccgcgatgcccgtcataaccgcccatcaccgttccgaccacttcaccgttcacctcagcgaccagaaacaaactgacgtcatggttcatcttacgctcgatgtccatttccggatcgttccacggacgcagcaagtcgcaacgctcccaaagggtgatgacctcttcgaaatcttcctggcgaaatacgcgtatctccatggtattcgttacctttttgcgggttaaaaggctgattatggcgtgaacggtcgaattagccaatatctgacgaaaatcggttgaaaaagtggcataatggggagttgtcaactattgaaatgaaaagtaaaacaattctcaacagcaaacggtcgtaacggattacgcgatacgatataacatctggaactttattattacaactcaggccgtatgagcacttttaaaccactaaaaacactcacttcgcgccgccaggtgctgaaagccggtttggctgccctgacgttgtcaggaatgtcgcaagccatcgccaaagacgaacctttaaaaaccagcaacggacacagcaagccgaaagctaaaaaatctggcggcaaacgtgtcgttgttntcgatccaggccacggcgggattgataccggagcgatcgggcgcaacggttcgaaagaaaaacatgtggtgctggcgattgctaaaaacgtccgttccattttgcgtaatcatgggattgatgcgcgtttaacgcgttctggcgatacgtttatcccactttacgatcgcgttgaaatcgcccataaacatggcgcagatctgtttatgtcaattcatgccgatggctttaccaacccgaaagctgccggtgcttcggtatttgccctctctaaccgtggggcaagtagcgcaatggcgaaatacctgtctgaacgcgaaaaccgcgccgatgaagttgccggtaaaaaggcgactgacaaggatcatctattgcagcaagtgctgtttgatctggtgcaaaccgatactattaaaaacagcctgacgctcggctcgcatattctgaaaaagattaagccggtgcataaactgcacagccgcaacaccgaacaagccgcgtttgtggtgttgaaatcgccgtcggttccttcggtgctggtggaaacctcgtttatcaccaacccggaagaagagcgactgttaggcacggcggcgtttcgtcagaaaatcgccacagcgattgctgaaggcgtgatcagttatttccactggttcgacaaccagaaagcacattcgaaaaagcgataagttatgaaacccgacgcacaccaggttaaacagtttctgctcaaccttcaggatacgatttgtcagcagctgaccgccgtcgatggcgcagaatttgtcgaagatagctggcagcgcgaaggtggcgnnnncgggcgtagtcgggtgttgcgtaatggtggtgttttcgaacaggcaggcgtcaacttttctcacgtccacggcgaggcgatgcctgcttccgccaccgctcatcgcccggaacttgccgggcgcagtttcgaggcgatgggcgtttctctggtagtgcatccgcataatccgtatgttcccaccagccacgcgaatgtgcgcttttttattgccgaaaaaccgggtgcagagccagtctggtggtttggcggcggcttcgatttaacccctttctatggttttgaagaagacgccattcactggcaccgcaccgcccgtgacctgtgcctgccatttggtgaagacgtttatccccgttacaaaaagtggtgcgacgattacttctacctcaaacatcgcaacgaacagcgcggtattggcgggctgttctttgatgatctaaacacgccagatttcgaccactgttttgcctttatgcaggcggtaggcaaaggctacaccgacgcttatttaccaattgtagagcgacgtaaagcgatngcctacggcgagcgcgagcgcaattttcagctctaccgtcgcggtcgttatgtcgagttcaatctggtctgggatcgcggcactctgtttggcctgcaaactggcgggcgcaccgagtcgatcctgatgtcaatgccgccactggtacgctgggagtatgattatcagccaaaagatggcagcccagaagcggcgttaagtgagtttattaaggtcagggattgggtgtaactccctcacccccattcccgcatccgctgatgcaacgtcaacgacggcttctcggcaaacagctgctggtaatccgtggcaaattgccccagatgccagaatccccactgcatggcggcgtcttttaccgttgtgctttgcgaccacgggcttatcagttcgcggcgtacggcgttcaggcgaatgcgtttcagccacacgttcgggccaattcctaaaatagcgtgaaacgcgttttgtagcgtgcggcggctgacatgcagttgattacacaagtccagcaccgtcaccggttcggacatgttttccagcacatattcacgggcgcgggaaagcaaccgacggtaactctgatgactgatgctttccgccgtcaccattggctgcgcttcttccagcatcgcccccatcgccattagcaaattatcccccagcacttttcgcactgcaggctgatggagattttccgggttctcgcaaaacgtcgccagcgcctgttggacaaagccccacagcgcggctttatgctgctctttcacttccagcgccgactggctacgcaacatatgtaatacccgatccggattatgcaaaaagttagcctgacgggtgatgacatcttcagaaagcactacgcccaggatcgtgtaatcgtccggcgtacttaattcaaactcggttccaccagggcgcgtcgctatttctgcgcttcccagacattgcgaaccgataaatccctgctcaccgcgcgtcgccggaatgccaaaccagaacgagttcggccagaccagacacgactgacgcagcgccagaccggtgtattcacgaaaaacctgaatatcatcgagtagaatttccgtaaattcaccatgaaacttgcccggatgcagctgatcgtaaatctgctgccaggcggtaatcgttaaagcatgttcatagacatccgttgtctgtcgttgatgaacattatccacttcgaccttcggcgtgagcttcaggttttcgggtaagggttcatgataaagatggtgcaaattggctgtacgggtctttttcatgatgttaatgccgggtgttgtaggacacccggcacctccgacaggttaatggggcttgagacgataacgactactgcgtttacgtaacgtcccagcagaaaagagctgttcgagcgcatttctggctttttccagcggccagccaaagtgggcagccacttctcctgccgtcattccctgacgtactgatgttaacagcgccaacaactcgtcagcagattccgcgacgataactggcgcgtcgggttcctttacgggttgcttcggctggcggttaaagccagtaaccagccactgggtgtcatcgtctggccgaccgatctccttacggctgatgacacgcccggtacgcatcgcggcagcacaacctgcgtccagcgcagcacgacacgccgccagatcgccttccaccaccagcgttaagcgacctgggtcaagcacttcgtgactgagcagacgaacgttagctgctttgagcatggcatccgctgcatctatcgcggcgaccatgccgtccacttccagcaatcccagtgcattgatcattggcaacctccgttacgcacgctggattggattacgcgcgatttccagcactgcatcggtaaaggcgttacaggccgctttacacgctgcctggctaccggttaaaaatgctgccgagtagttagtttcagacggtggcgggacataggtcaccagctgtacgtcggcagatttcaacgctgcatcaatgccgtaggtcgcttccagcggcggtgccaccagatacgccatcggatcgccaagcgtgatcccggcggttgatgagagataagaaccggtacgcgaaactacatgtgccaggaatgccgtatcttgcgcatcattagcccactggaaagcagcgccattttcaatatgcgcaaccatcgcatccagaccggcacgcacttccgccgggtttggcccaccaagcataatcagcacctcaccggcagtcggtgacgggccgtgtgccgcgcccgcatacagcgagcgaccatataccacttctaccatcgcttgtttggtcgcttcgtcagccgcaatgtaggttacgtcgtcagaatcggcagaaatcagaccgaggctacgaatatgtggcggcaatttcagttcacgcgcaaaatcggcgttaacggaggcaatcacccgcatggcggttaccgacggtcgaatcaaatctaaagctggcatgatgcctccttatcgggtcatgttgatgccggatgctttctgctccagcatacgtttcgccaaatccacaatgacggctgcggcttcaaccggcggcgtgccgccctggtgaatgttagagatacaggtgcgatcggcctcaacggtggtcgccatacgcggcgagtaaacggcgtagcaggagaggctttctgactgacccaaccccggacgttcgcccaccagcaggatcactactttcgcgccgaggatctcaccgatctgatcttcaatcttcacgcgaccataacgaacaaagaatggcgtgccgactttcagcccggcctgtttcaggcccgccatcagcggcggcaggatctcttcgtagttcacagtgatggcatcagttgacaggccatcagaaataacgacctgtacgtccggattagcaacacactgtgctttcagcgcttcaacagcttctgcacacaggcggcggcccatatccgggcgagtcaggtagagatttttgtcgctaatttcggagcgtacttccagcaagccctgcgctttcacccactcttccggcacttctttcagtacggtatctttcgaacgagagtgatcggccaggaaacgcagcagcgccagcgtacncggacncggaccggcacgaccggtacaaacgcgggccacggtgctgcgacgcagttctgttaacacatccgcacgatgtgggttttcaacaccaatccacacttttgcttccgcagaacctaaatccagcgcgcagctttccgaggtcaccggtgccgcacaggtggtagtggcgcactttgcttctgacggcgcgggggccgtttgtcccattgacgccatcacgctgcgtacaatttcttcaatctgtttttgatccatgatgtgttatctccgcgtcatcagaagaacagtgacggatcgcccgcacgtttggtcaggcgaccgtttgccataatgcccatgctttccagccagcgttcaaactccggtgacgggcgcaggttgagtaactgacgcacagtggcggtatcgtggaatgcggtggtctggtagttgagcatgatgtcatcacccagcggcatccccatgatgtagttgcagcctgcggtggcgagcaggatcatcaggttttcgttgaggttctggtcagcgtcagcgtggttggtgtaacagcagtcacagcccatagagatgccgctcagcttgcccataaagtgatcttctaagcccgcacggataatctggcggtcgttgtagagatactccggcccaataaagccgaccacggtgttgacgataaacggatcgtaatgacgcgccagcccatagttacgtgcttccatcgtcacctggtctgcgccgaagttagcgccagcggatagcgctgaaccttgtccggtttcgaagtagaggcagttttccccggcgatacggttgaactctgcacccactgcgcgcgcttcgtcgagcatcgccagttccacgccaaactctttcagccctttttcgctgccacagatactctggaaaatcagtccgccaggcgcgccgcgacgaatcgcttcgatctgggtggtgacgtgcgccagtacgcagccctgagttgggatgttgaatttgtcgatcacgccatagatggtgtccagcacgcggcttaagttttccacgtcgtcagtcaccgggttaacgccgatcaccgcatcgcccaccccgaaggaaagcccttcgtagatttgcgcggcgatactttgcacgtcgtcacgggtgtcatttggctgcaaacgggcgctgaaggtgcccggaataccgatggtggtattggcctttttgattaccggcattttcttcgcgccgtagatcaggtccgcgttggagcaaatcttcgctaccgccgcgaccacttccgaggtcagccctttgcgggtaaaggcaatgtcgtccacgctggtttcatcgctcagcacatactcacgcagttcgctgatgctccagtttttaatctggttgtaggccgtttcgttaacatcgtcctgaatcagccgcgtcacgcagtcatcttcataggcaatcaccggattattgcggatgtccgctacggtcatttccgacaacacctgctttgccgccacgcgctcctgtgagcttgccgctgcgacgcccgccagcacatcccccgaacgcagttcgttggctttagccagcacctcttttacatccttaaactgatatacattgccgaacaatgtggtctttagtttcataagtcgttccctcaggaaggaaatgcgagtgatttcaccgtcaccggcacaaccgatccgccaaaaagaggcgtaccaatgtcgatatagtcccccgcgcggacaatcacttcgtcaatgactgccaacgggagttgttgtagctgtgggcgcaacagcatgcccagagctttaccaaagtcctgcccggccaccaccagcaggggatgcggattcggaaaacgcgcgacgaaatcgaccaacgcgttgatgaccgtcagtaccgcggcgtaacgcacaggcagcgaggcgggaagcgccagcacgtacgcgtcagttttgggatcaagatccagctgaatcagcgcctgttgccaggcactcaccagatccgtttcatcaatcgggatcgccaccggcaaattgcgcagcggcagttgtacgccctccagccagattgtgctgccagagagcgaaagggtatgtgcgcccgcgccaatcaccgtggnnnncacggtttgcgccggaaactgcacgttcatctcacgcaggcgcggatggtcatgtagcgccgtcgccagtagcgggccaatatcggcaaaacagaacgggtcagcgggctggtggcgataacattcgcccacgccgccagaaagcgtaatgatttcgggcgtaacacctgcgggcagcaaaccggtttgcattaatgcctgcgcgagcggcgaaagcgttccgtcaatcacttcgacaatcagctctgccatccgtcgggtaacctgcaccagctgcgcgccggtcagcgaacggacgtcagtgcctgcaccgaaacactcatccacaatcatctgccccggtttatgagcgtaaaccacgcgcccctggctgtcggtttccagcaggcgaccaccgacgttgaggcaggcagtgccgctgatttttccggcatcgaacagggcgtagttcgcggtgccaccgccgatgtcgatattcagtacccgacacagccgttgttcagaaagggtttgcgccccggcaccgtgaccggcgatcacggattcgaggtgcggcccggcgctggcgacgacaaaatcgcccagcgactgagagagcgccatcaccgccgggcgagcattgcgggttttcgcgctttcaccggtgatgatgatggcaccagaatcaacgctttccggcgcaatgcccgcagcctgatattgctctaaaatcagcgatttcagttccgcttcttttaaaccaccctgtttatcgacaggggtaaagaacaccgggctttgccagctaatttcgcgtttgatgaattcgtagcgcggcacctgcgacaccgccgcacggttaaccagttccaggtgggagaaaatcacctgggtggtggtggtgccgatatcgataccgacgctcagtagctggcgagtgttcacgattgtgcctccgcttcggttttagccgcggtcgcgtcgtcttttggcaccagcatcatcgccacgccaatcgccgttacgccgccgatcaacttgccgacaatcatcgggaagatcatggcattcatgttggcagcggcgaagcctaagtggtcgcccagggcgaaagcagcggaaacggcgaaggcgcagttgatgactttgccgcgggtatccatctgcttcatcatgccgaacatcgggatgttgttggcaagcgttgccaccatgccggctgccgcgatgttgttcatattcagcactttaccgacgctcatcagcggtttttcaaaccagcgggtcagcagcagcaccatcggatacgcccctaacagaacgcaggagatagaaccgataacttcaatggcgcgcatcacctcaccgggtttatcgccaggggccataaagataggatccagaccggggatcagttcccagccaagcaggaatttcactaccgcagcggcaagaccgagggtgatcaatgcaacgaggaatttggcgaagatctggaagccgttgatcattttttctgggatgaatttcagccccagcgccaccagaatcgcaacaatgatcaccgggatcatgttcatcaggatcagggcgaaagtgaattccaccggctggccgttgatctgaacaccggagtacatagcaaccagaccaccagcgatacaaccaatcggaatggtcacaatgcccgccagcacgccgagcgccagataacgacggtcagaaggttcgataatgccgagcgccaccggaatggaaaacacaatcgttggccccatcatcgacccgagaattaacccagagtatagccacgcggntacgtcgnnnnccgccagctctttggcgaggaagaagccgcccatatcgcacgccagcagtgttccggcgaacatcgatgggttagcgccgagcatttcgtaaaccggaataattaccggcccgagtacgtgagccagtaccggtgccagcgcggtcataccgaccatcgccaggcccagtgcgcccattgccataaagccttcttcgaactgaccgccggatccttcgatacttttaccgaacttaccgaggaaacgagcagaaccgccgaactgtgacaggatcctgtctacggcagctatcagcataaagaacatcangatgtacatgatgatttcgttaattcccatcgcctttactccctgttagttgttatttattagcggatgctgcgtgaagccttatccgcactacatgtgcaatcccacagaccggataagacgcggcatttattgcgccgctgcgtacaggccgacaagctgttccaggctggcggtacgcgggttgctgcgcagacaaatatcttccagcgcggcctgcgcccatgcaccgtaatgcgcagatgtcgcgccaacatcgcccagtcgtttaccaatcccaacttccgcaatcagctcacttaccgcgttaatagcgtcacgatcgtcggattttttagttcgcagtgcccgaccaatctgactaaagcgttcgcgacaaaccatccggttaaactccatcaccgttggcagcaacatagcgttcgcgagaccgtgcggaatatgcagcgccgcgcccggctgatgcgccatcgcgtggcacaacccaagacccgcactggaaaacgccattcccgccatacatgaagccagcaacatgctctcgcgcgcggcaaggtcgtgaccgtagcccaccgctttcggcagcgatttgccaatcatcgcaatggcaccaatcgccagactgtcggtaaacggtgtagcgttcagggcgctgtatgcttcaatggcatgggttaacgcatcaatgccggtcatcgccgtgacatgcgacggcacaccttcggtcaatgcggcgtcgaggatcgccacatccggcatcagcgaggcatgggctaacacctgcttgcgcccgctcaccgcgtcgataatcaccgttacattggtggtttcagagccggttccggcggtagttggaatggcaatcagcggcaagcgcggttgcagaacgctggtttctgacatctctgccagcgtgctatccgggttcgtcaccagcaacgccacggctttcgccgcatccagcaccgagccgccgccaaatgcgatcaccccgtcacaacctgactcacgcaactgcgccacggctgcacacacgtcggtaatacacggttcgcccaccggacatggccagagcgtcatggcgatacctttaacggccaggctacgcgtcagcccggcggtcatccctgcctgatgcaaaaagctgtctgccatcacgaacagatgtttcagcccacgcgtttgcgcttgctgtccgcaactgctcaccgagcccggaccgcaaagcgtcaccggtggaacgctaaatgtttttacccgttgcagattcagggtatcgaacgcctgaaagagcgcggtctgcaattcattttgcatatagcccctccgctttctctcgcccactactggcgatcgccagcggggtcataaacaaactgtgctgcggtaaatgcacctgtaacgccgggaattgtttgcgaaacagttctgccacgcccggttgcatacaggagccgcccgccagccataaatcagtaatgccctgcccttcaatatgccgggcgacaatgtccgccattttttcgtacaccggtttcaccgtaggccaaatctcttcaccgtgaccgcgcttgtactgctccgcctcttccagcgaaatacggcgatttccggcgagagtcagagagatgtgatgtccgccggtggcttcatccgccgagtacgtcactttgccctttttcacgatggcaatgccggtagtgccaccgccgatatccactacaccggcgttgtccagttgcagcagatccgcgactgcggttggctcatccagcacatggctcacttccagcccggcagactccagcacgttgatggaaatacgcgggtccgtacctggaggaaatgaagtcgccgcatggctaaaacgacgaccgaattgctgctcgagcgtgtcgagatggcgacgaacaatggtgaccgcgccgaagaaatcccagacgatgccgtcgcgaaccacatcggcccagtcgaggcataccgccactggctgaccgtcgcggtcgacaaccatcgacaccacatcgcaggtgcccagatccactcccagccacagcggagattccgtcgcggcgggcgtctggttacacagcgttgccgccgtttgcagacgtggggtgagccattgttcgtcgtgcgccatctgttactccttaaacaatgcgaaacgcatcgactaatacacagcgacgcagacggacaaacgtacgcgcgctggttaccccttcaccggttggcgtggtgatggtcatggtggtccagccttccccgcccagccccagcccggcaatgcacggtccgttcttaacgaaaatgctggtatcaatagcattcgccatctggttcatgttttcgatgttgcgcgagtgcattgccgccgtgtggtggcaaccgccttccagtttcaccgctagcgcaatggcatccgccacgttggcgacgcgcacgacgggcaacaccggcatcatcagttcagtcacggcaaacggatgttctgcggtggtttccacaaacagcaggcgcgtttcttgcggaactttaaggccgattgccgccgcgattttgcctgcgtcgcgaccaacccagtcacggctgacggtgccttttccgcgctcgtcgatatttttcagcaacaccggttgcagctgctgcgcctgttctgcggtcagtttcaccgcgtgctggccttccatcagacgcatcagttcatcggctacgctatcaacaacaatcagtaccttttcgtcggcacaaatgatgttgttatcgaaagacgcgcctttgacgatggactgagcagcacgggcgaggtcagcggtttcatccaccactaccggcgggttgccagcgcctgcggcaatcagacgtttattggtgtgtttacgcgccgcttctactaccgcttcgccgccggtcaccaccagcaggccgatacccggaaacttgaacaagcgttgcgcggtttcgatatccggatttgccacagtaaccagtaagttttccggcccgcctgcggcaacaatcgcctggttgagcagcgtgatcgcccgctgggagacttttttcgccgccggannnngnnnnnnaatgacgctgttgcccgcggcaatcaggctgatggcgttattaattacggttgccgccgggttagtggacggcgtcaccgaagccaccacgccccagggcgcgttttcaattaaagtcaggccgttgtcgcccgtcagcacttgcggagagagacactcaacgcctggcgtgtcgcgtgcctgagcgacgtttttggcaaatttatcttcaacgcgacccatgccggtttcactgacggcaagttccgctaaatctctggcgtgtttttcgcctgcttcacgaatggcagcaatggctaactggcgcattgccacgctctttaacccttgctgggcaattttggctgccgcaacagcgtcatccagggacgcgaaaacgcccatctcatgaacggcggcgggcggcgtgtcactgctttgcattttcagcagtaccgctttcaccacctgttcaatatcctgttgattcatgatgttctgccttatttgtggaaaattacctgaccgccagacaccacctcatcgacgatgccaatcacgcacagatcgaccggtgacgtttcgcttttatgcgcctggcgggcggaactgccactcaccagcaacacccactccccggttcccgcgccaatattgtcgatggcgacggcacattgcccgtcaggattaccatgtggatcaatcatttccaccatcagcaatttgtcatgcgccagtccgtgatggcgtacggtacaaacaatttgtccagtgacgactgccagtttcatacccgcctccgtggcgtatttcaggtaaaagctccccctaccctccgcggaaggtaaaatgaaaaatgagagagcgtgacgcccgaatcgacgtcacacagggtgattacaggttgctgctatcgcctttcaggccgatcgggaacacttcttccaggtcgccgtgcggacgcgggataacgtgtacagataccagctcgccgatacgctgtgccgctgcggcaccggcatcggtcgccgctttacaggctgcaacatcaccacgaaccatggcagtacacaggccgccgccaatctgcttaacaccaaccagcttgacgcgcgcagctttcaccatcgcgtcagaagcctcaatcagtgcaaccaggccccgggtttcgatcattcctaatgcttccattgtgctttcctctttatcagggtccagaacgggaccgttcattcaaccagtgtttgtaaactgctttcgcggttcacttctgtctgacgcggcacagctgccaccagcgccagctcgataatttcctgcacactacaaccacgagagagatcgtgcatcggcgcggcaagtccttgtatcaatggcccgacggcacgatatccgccgagtcgttgtgcgattttgtagccaatatttccggcttccagcgacggaaaaaccatcacattggccttgccctgtagcgggctggcaggcgctttttgcgccgccacttccggcacgaaggcggcgtcaaactgcaactcgccatcgactaccagctttggtgcgcgctcacggacgatttctgtcgcctgctggacattggcaacgcaggggtgacgggcgctaccgttactggaaaacgacagcatcgccacgcgcggctcttctccggtgatggnnnnnnnnnnttcggcgctggcaagcgcgatatccgccagctgnnnnnnnnnnnnnngtggtaccacgctgcaatcggcaaagcccaacgccggaccgctgtactgtggcagcatcaggaaaatggatgagagcgttttacagcctggctgcaagccgataatgcgtaatccggcacgcagcacattcgccgtggaagagaggttgcccgcgatacagacatccgctttaccggcgctgaccattgcggcggcgaacatcagcggatcggtaagtttttccagcgcatccggcggcgttttttcgcccgcgcgggccagccagcgatgagcaaattcttcccgcattgcgaggttgccatgcggatctatcacctgtagcccgtccatcgccacgccgtgactgagcgcaaactgacgaagttcaaacggattggcgaccagaatgggcgttgccagaccttgttgatgtaaatattgcgcagctttcagcacacgttgatctaacgcatccggaaaaaccactctggcgggcgctcgcaacgccagttcacaacaacgttcaataatcattgcgtttcccccagtcgttgttggatctgcttcaccgttagcggctgcttcgttacgctcaggatcatcatcacgtagaccgtgctggaaaggcggttcagcgcctgcaagatgtccgggcgtaatacttcaaaactgcgggtgataaacacctgcgccgctacggtttcggcttcccgcactttggtgcgtagcagattcagcaacgccgcatcgcgcccgtggcttgcttccggcaccagatgatcgtgaccaagataacgcaacggctgatgagaaagccggtgcagatcttcgtcagaaagcccgacaatcgcctggcagcccagcggttccgccagttcaatttgcagccacactgccagcgcaatggtgctgtcgagaactgcgcgaaaacccagacgcggatcgcttttggcgaccattttttccgccgacaggtgagtcagcgtatccggcttttttgccaccggctggcggcacagttcgcagcacgcctgcggatgttcatcgctactggttagcccatgaacgggctgcggctgctgctgttcatcgtcaacaaacaggcggccctgctcgtcaataaacttgatgcgcagatggcggctttccagcaactcccgggcagagggcgtcaggcgactgtccgcagggagatggatctctgcgccttcgctgagcgtatggttcgctcttagccatgcttcggtgatgaaatctttcatagggattgccagttagccggccaggcgacatacaggaatttcacgctggatgtcgtaccaaattcgatgctggagcctttcgggataaacatcacgtcgcctgctttagcgatcatggtttcgccttcgtggcgaacatggagctccccttccagcaccatgtcgatttcgtcgtagttcagggtccacgggaagaatgcgttctcccactgcataaaaccggcggccatgctgctgccgtcgtctccggtcacaagatcagtcaagcccacgcaatgcggttgtgcgccatcaaagcgaccaaacttgacgctgctaccatcaatcactttgatgccgcctttgccggtcaccgatttgaagctcggctgcattgcaccctgctccagcgactgtttttccttcatcactttttccatcagctgcgcgaccaggctttcggtaaactggccttccggtagctgggcgataatggtttcgcggatgcgctggctttcggttttatcggctggcacgctggcgggcacggacgccgtcaccgggatcaattcatcacattcggtgatggtaaaacccagtagatccgccacttcacgggcttccggggtaataatgatggcgcgcagaaccacggacattgcctgttcgccgcgngcgtgtgcttcacgaatatcattcgctgtgatgagttttttcacctgcttcctcctgtttggtgagagatgccagataatccaccagttgctgcacgctttgcgggtcgtggctgtttagctcgaaaatcggctcctcgaagcccgtctcaagcaataactttcgcgttgcggcgacgtcagcatccggcatgtccgttttactgatgacggcgatttgccgtttgctgacgccaatatccagcaacccggcaggcaaccgactttccgggtcattcgcgccgtggacatagatcagcatgtccacatcctgtagcgtggtaattaaggcgtgataccagcggggatggctaaaatattcacccggcgtatcaatatcgcccttatcattaaattccacggcctgtgtttttctggcgagggtataattcccctgcaacgcattaaataacgttgttttccctgccccgacggtacccacaaacgcaattcgtttcatgaatgcctcgtattaacttttggtcatttcacaaagcgtataatttaataagcgacctaaaccactgacggtttgtgataacgcttcttctactgcgcccaccgagccataaatcaccaatgcaccactgaagcggtcgagaaatccgatatgcacatcggcggctttcagcgctaaatcaccggcgatcatcgccgtttcgccgggagttagcgtcataatgccaattgcgcccgcatccggaacgccgattttcttcgccagttcctcgccgggatgcgcgatgagatgcgccagtgtgacctgtttgccgggcacaaattcctgaatgatgcgttctttatccatgagtcgccgcctgtgaaaaactttcgtgtatcgtgacaatttttcgtcagagtaaataacaaaattcggcaagcgcgtttaaaaggtgaggtagatcactaagaatggagagatatttactgttatgaataaactttcatatgcgacgcatgaatataaataaaataatatcgagatattttatatactgctttttttattattcgcaaactcagtaataagctttactaatatattgcagctaaaccgcttaccctgaatattcagggtaagcgtgagagttaaaaaagaattacagcggttgggtttgcgcttcaaccacggccagcgccaccatgttgacgatacgacgcaccgatgcgatcggcgttaacacgtgaaccggtttcgccacgcccatcagcaccggaccgacagtcacaccttccgagctggaaacgcgcagtaagttgtaactaatgcgggcagcttccatgttcggcatcaccagaatattggcagaacctttcaaagggctgtccggcatacggtcgttgcgaatcgcttccaccagcgctgcatcgccgtgcatttcaccatcaatcatcagttctggcgcacgttccctgaccagttccagcgcctgacgcattttgctcgacgacgggcagtcagaagaaccaaagttggagtgcgacaacagagcaacgcgcggttcaataccgaaacgacggacagtttctgccgccatcaaggtgatctccgccagctcttctgcgtctggttcgtcattgacgtaggtatcggcaataaaggtgttaccactcggcagcagcagcgcgttcattgcacctgcggtgtgaacgccatcgcgataaccaaagacatttttcaccacgctaaaatgttcatgataatcacccaccgtaccgcaaatcattgcatcggcttcgccacgctgaaccatgatcgcgccgatcactgtcgggttactgatcagcgcccgctgcgcctgttcctgagtgacgccgcgacgcttcatgatctggaagtattcggtccagtactctttaaagcgcggatcggattcgttattgacgatctcaaaatcaacgcccgctttgatctgcaagcccagtttctgaatgcgcatttcgatcacgttcggacgaccgataaggatcggtttcgccagtcccagcgttaccagttcctgagtggcatgcagaacgcgcgcctcttccccttccggcagaactacgcgcttcggcgctttgcgagcctgggagaaaatcggcttcataaacaggttggttttgtaaacgaactcagtcagcttgtcgatgtagacgtcgaaatcagcaatcggacgcgtcgccacgcccgactccatcgccgctttcgcgaccgcaggagcaatcttgactatcagacgcggatcaaacggttttggaatgatgtattcagggccaaagctcagatcctgatcgccatacgctgaagccaccacttcactctgttccgcatgggccagttctgcaatcgcgcgtaccgccgccagtttcatctcttcgttgatggcggttgcgccaacgtccagcgcgccacggaagatgaacgggaagcaaaggacgttgttcacctggttcgggtagtcggaacggccggtacagatgatggcatccggacgcacttcnntcgccagcggcggcagaatttccggttccgggttcgccagcgccaggatcattggcgctcgagccattttcttcaccatttcctgggtcagcactttcgggccggaacagccgaggaaaatatctgcgccttcaatcacatcatcgagggtacgtttgccgtcatccactaccgcatatgcggctttggtttccgccatgtttggctcncggccctgatagataacgccttttgaatcgcaaaccacgatgttatgtttttgcagacccaacgctaccagcaggttcatacaggcgattgctgcagcacccgcgccggaaaccaccatacgcacgtcagagatgtttttctccaccacgcgcaancngttgaggatggcggcagtgctgataattgccgtgccgtgctgatcgtcgtggaataccggaatattcatccgctcgcgcagtttctgttcaatatagaaacattctggcgctttaatgtcttcgaggttgatgccgccgaaggtcggttcgagcgcagcgacgacttcaataaatttgtccgggtcgagttcatcaacttcaatgtcaaatacatcaatcccggcgaatttcttaaacagaacgcccttgccttccatcaccggtttgcctgccagcgcgccaatgttgcctaaccccagcaccgccgtaccgttagagatcaccgccaccaggttaccgcgcgcggtatatttgtaggcttttaacgggtctttttcgatttcaagacaaggtgcggcaacgcctggtgagtaggccagcgccagatcgcgctgcgttgccagaggcttggttggagaaacctggattttccctggaactggaaattcatggaaatcaagtgcactttgttttaactggtcatccatttggttgttcctttcacgtaacgttcacaaataaagtgtgtgggcaacagcccctgcccacaacgtggcgcacattattaccttgccggagtctacagactttgagcaagtccaaactctcaccattaatataatgttttggtaataatcctataacactgatgttacctgcttaatccagcaataccatgcctgtctgctatgcttttttgatgcgtttagcgaaatttctcagaagtgtgaattaacgcactcatctaacactttacttttcaaggagtatttcctatgaacgagttagacggcatcaaacagttcaccactgtcgtggcagacagcggcgatattgagtccattcgccattatcatccccaggatgccaccaccaatccttcgctgttactcaaggctgccggattatcacaatatgagcatttaatagacgatgctatcgcctggggtaaaaaaaatggcaagacccaggaacaacaggtggtcgcagcgtgtgacaaactggcggtcaatttcggtgctgaaatcctcaaaatcgtacccggtcgcgtgtcaacagaagttgatgcacgcctctcttttgataaagaaaagagtattgagaaggcgcgccatctggtggacttgtatcagcaacaaggcgttgagaaatcacgcattctgatcaaactggcttcgacctgggaaggaattcgcgcggcagaagagctggaaaaagaaggtattaactgcaacctgacgctgctgttttcttttgcacaggcgcgggcctgtgcagaagcgggcgtttttctgatttcgccgtttgtcgggcgtatttatgactggtatcaggcacgcaagccgatggacccgtatgtggtggaagaagatccgggcgttaaatcggtgcgcaatatctacgactactataagcaacaccactatgaaaccattgtgatgggcgcgagcttccgtcgcaccgaacaaatcctcgccttaaccggctgcgatcgactgactatcgcaccgaatttgctgaaggagctgcaggaaaaagtttcgccagtggtacgtaaattaatcccaccttctcagacgttcccacgcccagctcccatgagcgaagcggagttccgttgggagcacaatcaggatgcgatggcggtagaaaaactgtctgaaggcattcgtctgttcgccgttgatcaacgcaaactggaagatcttcttgccgccaaactataaaccagccacggagtgttatatgtcccgaaaagaccttgccaatgcgattcgcgcactcagtatggatgcggtacaaaaagccaattctggtcatcccggcnnnccgatgggcatggctgatattgccgaagtgctgtggaacgattttcttaaacataaccctaccgacccaacctggtatgatcgcgaccgctttattctttccaacggtcacgcgtcgatgctgctctacagtttgctgcatctaaccggttacgacctgccgctggaagagctgaagaactttcgtcaactgcattcgaaaacccctggccacccggaaatcggctatacgcccggagttgaaaccaccaccggtcntcttggacaaggtttggcgaacgccgtcgggctggcgatagcggaacgtacactggcggngcagtttaaccagccggatcatgaaattgtcgatcacttcacctatgtgtttatgggcgacggctgcctgatggaaggtatttcccacgaagtctgttcgctggcgggcacgctgggactgggcaagctgattggtttttacgatcacaacggtatttcgattgacggagaaaccgaaggctggtttaccgacgatacggcaaaacgttttgaagcctatcactggcatgtgatccatgaaatcgacggtcacgatccgcaggcggtgaaggaagcgatccttgaagcgcaaagcgtgaaagataagccgtcgctgattatctgccgtacggtgattggctttggttcgccgaataaagcaggtaaggaagaggcgcacggcgcaccgctgggggaagaagaagtggcgctggcacggcaaaaactgggctggcaccatccgccatttgagatccctaaagatatttatcacgcctgggatgcccgcgaaaaaggcgaaaaagcgcagcagagctggaatgagaagtttgccgcctataaaaaggctcatccgcaactggcagaagagtttacccgtcggatgagcggtggtttaccgaaggactgggagaaaacgactcagaaatatatcaatgagttgcaggcgaatccggcgaaaatcgctacccgtaaggcttcgcaaaatacgcttaacgcttacgggccgatgctaccggagctgctcggcggttcggcggatctggctcccagcaacctgaccatctggaaaggttctgtttcgctgaaggaagatccggcgggcaactacattcactacggggtgcgtgaatttggcatgaccgctatcgccaacggcattgcgcaccacggcggctttgtgccgtataccgcaacgttcctgatgtttgttgaatacgcccgtaacgccgcgcggatggcggcactgatgaaagcgcggcagattatggtttatacccacgactcaattggtctgggcgaagatggtccgacgcaccaggctgttgagcaactggccagcctgcgcttaacgccaaatttcagcacctggcgaccgtgcgatcaggtggaagcggcggtgggctggaagctggcggttgagcgccacaacggaccgacggcactgattctctccaggcagaatctggcccaggtggaacgtacgccggatcaggttaaagagattgctcgtggcggttatgtgctgaaagacagcggcggtaagccagatattattttgattgccaccggttcagagatggaaatcaccctgcaagcggcggagaaattagcgggagaaggtcgcaatgttcgcgtggtttccctgccctcgaccgatattttcgacgcccaggatgaggaatatcgggagtcggtgttgccttctaacgttgcggctcgcgtggcggtggaagcaggtattgccgattactggtacaagtatgttggtctgaaaggggcaattgtcgggatgacgggttatggggaatctgctccggcggataagctgttcccgttctttggctttaccgccgagaatattgtggcaaaagcgcataaggtgctgggagtaaaaggtgcctgatggtgatcgccggatgctgattgccggatgcgacgctgacgcgtcttatccggcctacagcgtcttatccggcctacatgtcccgccattttgtttaacgggtgatccacaacgtgggccaggcgtctggcccatgccagttatcgcaggtgggttctgcggcgtaacgcaccaggcgaaaacgctgaccgtcaaagcgccagcgcgcctgaatgccacaatcgcttaatccgcgccctttcgctaaggtcaccagttcacgcgatttctcatcaaatgttgcgttcatcagttccagttcattcgtctcctgaccgttgttgaacggcaaacgcagccggaccgggcgcgaggccagcggctttttacgcgacacaatccatgccaaatcaatggtgttataggcccctgcctcacagctaatcatcatcagcgctttatcatcagtcagcgcagtgacattcacctcacgacgcaatggatcaagcgagcagcgcagaccattcatccgccagtttccataatccagcaaatcgttgcgttcttcgagtgagagtggcgtcggcgttgggttaaccaccacgacctctttcagcgcaggcgcgggcggtacgctgagcggcggttcgtcccctttcttgatccacgcggtttcactgccaacgcgcttttgctgagcatcaataaacaacaacgccgcttttaagtcactcagagaaatggtctgattgccgtcgcgtaaggtgatcgccttcccttcctgaatcatctgcaaaaacgcggtgatggttgccgtatcatcggttactaataaccatggtgaaatccgccacttgtcaccacttaacgccaacggctcgccatctaacagcagccgtggcgcaatttccccttcagacgcatccggcgacttcaacccgccgcgctcaatacgtaaaacggcatcggtatgcgccccggcgctgcggctcagggtcatcaccagtccattatgatcgcccgtattacgcgccacgcagaagttttggttattacaggtgacctgccagtcggaaaacgcccgttgcgctggtgccgcccacaccaaagacgtcggcaacaaagcgaaaaaaaagagaaggaaaatgcgatagcgcatggacggtacgaccccagaagttcaaacaaacagcacaagtcgtatcttcgttgcgcaggtagcgcggctcaatcggatttgtcggattgagccaagaataaacaacgaaatattattgttatttttcagtccattaaatgtgacatttgcaaatagttaagcaataacaccgtcttaccgtcacgtatctcgccggttttgatcatctccagcgcctggctgaacggcagctcgagcacttcaatatcttcatcttcgacaccgccaccggcgttagcgcgctgattgtcactgtattcggcgataaaaaagtggattagctcagtcacaccgcctggcgacatatacagttcaaataatttgcgcacttcgcccacttcatagcccgtctcttcaatcgcttctttgcgaatgcacacttccggttcgtcgttatccagcagcccggcgcaggtttcaatcagctgcccgctttcattgccattaacccaggtagcgacacggaactgacgaatcagaaccacggtctttttcttcgcgttgtacaggaggatcgtcgcaccattaccgcgatcgtaaacttcacgtttatggcggataacttcgccatctttgcgcgtgagatcgtaagtaatgttgtgcagggtgaaatagttatcggagagaattttgtttttaatgagggtgatttgttgcgtcataccgactccacagcgcgaaatgaacaattatattacgctgtgaagtcgggtttgtctgcgcaggctatcagtgagatttgactgattttacccccagccagtcaataatcccctgtgccgcatgacgtccttctgccattgcggtaaccaccagatccgcaccacgcacggcgtcgccaccggcgaagattttcggattggtggtctggtaacggtactggctttccacatccgcgatgatgcggccccatttgtctaccgttacaccgtgcgactccagccacggcatcccgtgcggattgaagccaaacgccataatcaccgcgtcggctggcatgacaaattcactgccttccaccggcactggacgccgacgcccctgggcatccggctcgccaagacgcgtgcgcaggaaacgaatcccgcagacgtgaccttgttcattcagctcaagcgccaccggctggacgttaaattcgaagttggccccctcttcgcgggcgttcttcacntctttcttcgagcctggcatgttagcttcatcacgacgataagcgcaggtgacgttactcgcgccgtggcgcagcgcagtacgcacacagtccatcgcggtgtcgccgccgcccagtaccacgacgttaagtccggcggtattgataaacggctcttccggtagctcttcgagccccatcacctgtttagtgttggcgatgaggaacggcagcgcgtcataaacgcccggcgcatcttcattgggtaaacccgctttcatggaacggtaagtgcctacgccaacgaagaccgcgtcgtattgttccaaaagcgaatccaaagagacatctttacccacttcacaattgagttcgaagtgaatccccatcgcgctgaagatttcccgacgacgtgccagcagggatttatccagtttgaaagaaggaatgccgaaagtgagcaagccaccgatttctggatggcgatcgtacaccgtcaccgccacgccattgcggatcagaacatccgcacaggccagccctgccggacctgcaccgataatcgccacccgcttgtccactttggtgacatggcttaagtcaggacgccaacctttcgccaacgcctgatctgaaatgtagcgttcaatgttgccgatagttaccgcaccgtgctcatcgcgaatagtacaggcaccttcacacaaacggtcttgcggacaaacgcgtccggtaatttccggcagggtgttggtcaggtgagaaagctcgacggcggcgtcgatgtttccggctttcaccagttcaatccactgcggtatatggttatgcagcgggcaggtccattcacaaacgctgtgctcgccgcatttaaggcagcgcgaggcttcccgttgtgcctgatcggcacggaatggcagataaatttcatcaaaaccggttttgcgcgcttcaatcgccagtttatccggctcgccacgcgcgggcgttgcctgcatttgttcgactttactcattaccggcatttcttgtgcagcggtactggcatgccacggttgatgttcctgacgtgcggtacgcaagcggcgggatttcgccatgcctgagagtgcggcgtcagtgaccagctgcagcgcgtccgccgggcaattctcgacacaggcaggaccgttttcgcgccctgcacaaaggtcgcatttatgcgccgtggctttaactttgcccgctgcgacgggtgtcaggacgatttgcatcgtaccaaacggacaggccaccacgcaggatttacagccaatacacttttgctgattgacctgaatgctgtcatcaacgtggctgattgcgccattagggcagctacgggcgcagggcgcatcttcacaatggtgacaggtcactgcactacgttgctgctgatgtttgataaccgtaattcggggatgaaaatggtgttggctcaggacatgttgctcatcattgtgagccatgacacaagcgatttcacaagcatgacaacccagacattgctgactgttggccataataaaacgattcataacgaccttcttttttggttgtaaaaaccttattctttatatgagtgttgttattacccgacttacaggggaatcggcaatgttcatgtgcccagaataagtaactatttcgctataaactgtggcagatcaaataatcccatcactaactaaattgcgtttcagcgaactggaacattaatgattttttgtggagaagacgcgtgtgattgttaaacgacccgtctcggccagtnnnnnncgggcctttttttacattgtgctgctgtcgattctttccacgggtatcgctctgctaactctggcgagcagtttgcgcgacgctgaggctatcaatattgccggatcgctgcgtatgcagagttaccgcctgggctacgacttgcaaagtggcagtccacaactcaatgcacatcgccagctgtttcagcaggcactgcattcaccggtattaaccaacctcaacgtctggtatgtgccagaagcagtaaaaactcgctatgcgcatctgaatgccaactggctggagatgaataatcggctcagcaagggcgatttgccgtggtatcaggccaatattaataattatgttaatcagatagacctgttcgtgctggctttacagcactacgctgaacgcaaaatgctgctggtggtggcgatttccctggctggcggtatcggtattttcacgctggtcttttttactttgggccgcatacgccatcaggtggttgccccgctgaatcagctggttaccgccagtcagcgtattgaacacggacagttcgactcgccaccgctggataccagcctgccgaatgagcttggtctacttgcaaaaacctttaaccagatgtcgagcgagctgcataaattgtaccgttcgctggaggcgtcagtagaagaaaagacccgcgatctccacgaggccaagcgtcgtctggaggtgttgtatcaatgttcgcaggcgctgaacaccagccagattgatgtgcattgtttccgccatattttgcagattgttcgcgacaatgaagcggctgaatatctggagttaaatgtcggtgaaaactggcggattagcgaagggcaaccaaacccggaattgccgatgcagattttaccggtgacaatgcaagagacggtttacggcgaactgcactggcaaaatagtcacgtttcatcatcagaaccgctgcttaacagcgtttcgtcgatgctgggacgcggtttgtactttaatcaggcgcagaagcattttcagcagttattgttgatggaagaacgtgcaaccatcgcccgcgaattgcacgactcgctggctcaggtactttcttacttacgtatccagttgacgttacttaagcgttcgataccggaagataacgccaccgcacaaagtatcatggccgatttttcccaggcgttgaatgatgcttatcggcagttacgcgagctgttgactacttttcgcctgacgctgcagcaggcggatctcccctccgcgttgagggaaatgctggatacgttacaaaatcaaaccagcgccaaactgaccntcgactgccgtctgccaaccctggcactggatgcgcaaatgcaggtgcatttgttgcaaattattcgcgaagcggtgctgaatgcgatgaagcacgccaacgccagcgaaatcgccgtcagttgcgtcaccgcgccggacggcaatcacacggtttatatccgtgataacgggattggtatcggtgaaccgaaagaacccgaaggtcattatggtctgaatatcatgcgcgaacgcgcggaacggctaggtgggacgctgactttttcacaaccttccggcggcggcacgttagtgagtattagctttcgctctgcggagggtgaggaaagtcagttgatgtaatgcctcctactgaccaaagaatacttgcagttaaggttcagtataaaagggcatgataatttacattaactcctttttttctccacgattggctcgtaccttgccgctacagtgaagcaagtcaagcctacaacgatacgcagaaacacgaggtcctcttttaatggcgaatttctttattgatcgccccatttttgcctgggtgctggcaatcctgttgtgtctgacaggtaccctggcgattttttcattgcccgttgaacaataccccgatctcgcgccaccgaatgtgcgagtgaccgctaactatcccggcgcatcggcccagacgctggaaaacaccgtgacccaggttatcgagcaaaatatgaccggcctcgataatctcatgtatatgtcatctcagagcagtggcaccggtcaggcatctgtcactttaagttttaaagcaggcaccgatccggacgaagccgtgcagcaagtacaaaaccagctgcaatcagccatgcgaaagttaccgcaggcggtgcaaaatcagggcgtgactgtgcgtaaaaccggcgataccaacattctgaccattgccttcgtctctaccgatggttcgatggataaacaggatattgctgattatgttgccagtaatattcaggacccgttaagccgcgtaaatggcgtcggggatatcgatgcctatggttcgcaatattccatgcgtatctggctggacccggcgaaactcaacagtttccagatgacagctaaagatgtcactgatgccattgagtcacagaacgcgcagattgcggttgggcaacttggtggtacaccttccgtcgataagcaggcgctcaacgccaccattaacgcccagtcactgctgcaaacaccagaacagttccgcgatatcaccttgcgggtgaatcaggacggctcagaagtaaggctcggcgatgtcgccnnngnnnaaatgggggcggagaaatacgattatcttagccgcttcaatggtaagccagcctccgggttgggggtaaaactggcctccggcgcgaacgaaatggcgacagcggagctggtgctcaatcgtctcgacgagctggcgcagtatttcccgcacggactggaatacaaggtggcgtatgaaaccacctcgtttgttaaagcctccattgaagacgtggtgaaaacgctgctggaagctatcgctctggttttcctcgttatgtatctgttcctgcaaaacttccgcgccacgctgatacccactatcgccgtgccggtggtgttgatgggaaccttctccgtactttacgccttcggttacagcgtcaacaccttaaccatgttcgcgatggtgctggcgatcggtctgctggtggatgacgccatcgtggtggtggaaaacgtcgaacgtattatgagtgaggaaggactcactcctcgcgaagccacgcgtaaatcgatggggcagatccagggggcactggtcgggattgcgatggtgctttcggcggtatttgtaccaatggccttcttcggcggcaccaccggtgccatctatcgccagttctctattaccattgttgcggcgatggtgctgtcagtactggtagcgatgatcctcactccggctctgtgtgccacactacttaagccactgaaaaaaggtgagcatcacgggcaaaaaggcttttttgcctggtttaaccagatgtttaaccgcaacgccgaacgctacgaaaaaggggtggcgaaaattctccaccgtagcctgcgctggattgtgatttatgtcctgctgcttggcggcatggtgttcctgttcctgcgtttgccgacgtcgttcttaccgctggaagaccgtggcatgtttactacctcggtacaattgcccagcggttcaacccaacaacagaccntgaaagtcgttgagcaaatcgagaaatattacttcacccatgaaaaagacaacatcatgtcggtgtttgccactgttggttctggccctgggggtaacgggcaaaacgtggcgcgaatgtttatccgcctgaaagactggagcgaacgcgacagtaagaccggcacctcgtttgccattatcgagcgtgcaacaaaggcgtttaaccaaattaaagaagctcgcgttatcgccagcagcccgccagcaattagcggtcttggtagttctgcaggttttgatatggagttgcaggaccacgctggagcaggtcacgatgcgctgatggcagcacgtaaccagttgctggcgctggcggcggaaaacccggagctaacccgtgtgcgccataacggcctcgatgacagtccgcagttgcagattgatatcgaccagcgtaaagctcaggcgctgggcgttgctatcgacgatattaacgacacactgcaaaccgcctggggttcgagctatgtgaatgactttatggatcgcggtcgcgtgaagaaagtctatgtgcaggcagctgcgccgtatcgcatgctgccagatgacatcaatctctggtatgtccgaaataaagatggcggcatggtgcccttctctgctttcgcgacctcacgctgggagacaggctcgccgcgtctggaacgctataacggttattctgcggttgaaattgttggggaagccgcaccgggggtcagtaccggtacggcgatggatattatggaatcgttagtgaagcagctaccaaacggctttggtctggagtggacggcgatgtcgtatcaggagcggctttccggcgcgcaggctccggcgctgtacgccatttccttgctggtggtattcctgtgtctggctgcattgtatgaaagctggtcggtaccgttctcggtaatgctggtcgtgccgctgggggtaatcggcgcgctgctggcaacctggatgcgcgggctggaaaacgacgtttacttccaggtgggcctgttaacggtcattggtttatcggcgaaaaacgccatcctgatcgtcgagtttgctaacgagatgaaccaaaaaggccacgacctgtttgaagcgacgctccacgcctgccgtcagcgtttacgcccgattctgatgacctcgctggcatttatcttcggcgtattgccaatggcaaccagcacgggtgccggttccggtggtcagcatgcggtgggtactggcgtaatgggcgggatgatttcagccactattctggctatttacttcgtgccgctgttctttgtgctggtgcgccgccgcttcycgctgaagccgcgcccggaataagcaataaaaaaggcgacatgccaatgtgtcgcctttttcaactttccgattaagaacctgctcagcgggttcttgctgtttgtactttgtctcaggaattacttacgaagcataacttcaataaagtctttccagttccccagttcacgttcaatcataacaacctctcttataattatgggtattctacggaaacaatataccgtggtgaagctaatttactcgattgctgcgatgactacctccgggggacaaaccttatgtaaatactatggtcctgcagtgatgatttgtatgtgatacacagcaacatttcgagatattcatacggcatctaatactgatttaattctggttaaaatacagacagataacaagatgaatattcttaatgtttacgttaaaaatgtttaatattatttaatagttgttaatttgaatacttcgataatgttatatttcctgataatcatttgcaggcaaaatgttttcactcttaaatgagtatttattctcataaatcgaaaaaggattcattatggttacactttacggcatcaaaaattgtgacaccattaaaaaggctcgccgttggctggaagccaataacatcgactatcgttttcatgattaccgcgtcgatgggctggacagcgaattattgaacggttttatcaacgaattaggctgggaagcgttactcaacacccgtggtacaacctggcgtaaactggacgaaaccacccgcaatanaatcaccgatgcggcctctgcggcggcattaatgactgaaatgcctgcaattatcaaacgtccattgctctgcgcgcctggtaagcctatgctgctgggtttcagtgattccagttatcagcaatttttccatgaggtgtagtctatgtcgtgcccggttattgagctgacacaacagcttattcgccgcccttccctgagtcctgatgacgcaggatgccaggctttgttgattgaacgtttgcaggcgatcggttttaccgttgaacgcatggactttgccgatacgcagaatttttgggcatggcgtgggcaaggtgaaacattggcctttgccgggcataccgacgtggtgccgcctggcgacgccgatcgttggatcaatccgccgtttgaaccaaccattcgtgacggcatgttattcgggcgcggtgcggcagatatgaaaggctcgctggcggcgatggtggtagctgcagaacgttttgtcgcacaacatcccaaccatacagggcgactggcatttctgatcacctctgatgaagaagccagtgcccacaatggtacggtaaaagccgtcgaagcgttaatggcacgtaatgagcgtctcgattactgcctggtcggcgaaccgtcgagtatcgaagtggtaggtgatgtggtgaaaaatggtcgtcgtggatcgttaacctgcaacctaaccattcatggcgttcaggggcatgttgcctacccacatctggctgacaatccggtacatcgcgcagcacctttccttaatgaattagtggctattgagtgggatcagggcaatgaattcttcccggcgaccagtatgcagattgccaatattcaggcgggaacgggcagtaacaacgttattccgggtgaactgtttgtgcagtttaacttccgcttcagcaccgaactgactgatgagatgatcaaagcgcaggtgcttgccctgcttgaaaaacatcaactgcgctatacggtggattggtggctttccgggcagccatttttgannnnnngcggtaaactggtggatgcggtcgttaacgcggttgagcactataatgaaattaaaccgcagctactgaccacaggcggaacgtccgacgggngctttattgcccgcatgggggcgcaggtggtggaactcgggccggtcaatgccactattcataaaattaatgaatgtgtgaacgctgccgacctgcagctacttgcccgtatgtatcaacgtatcatggaacagctcgtcgcgtgatgagtggttctgcaagaggaaataagcatggactggctggctaaatattggnggattctggtgattgtctttttggtaggcgtcctgctgaacgtgattaaagatctcaagcgcgtcgaccataagaaatttctcgccaacaagccggagcttcccccgcatcgtgatttcaacgataagtgggacgatgacgacgactggccgaaaaaggatcaaccgaagaagtaagctaagtggccggataaggcgttaacgccgcatccggccatgatgcctgatacggtcttatcaggcctacccggctattattacatcatttcaatcacatcatcatcgccaggcttaccgccgcttagcgcttcgtcgaaataatgtttcggaatggtataacgcaagtgatccagggcaaattgcatactgcgattgtcgatcgcatggcctaaatcctccacgatatccagcgtcacgtcaccaccggcactgattaacgcttcctgcgccgcaactgcatgcgccagatcgataaccggatcttcaccgccatgaatcaagtgaattgtcgtggctgtagacgcggtttccggcaggctcgcatagcgtccgttaaaagcaatgacgcgtgaagcaaggcccggttcggctttaatgctctccagcgccataatcgcgccttgagagaaaccgattagcgccgtggcgttagcccctactccgctctgtttctgccagtagcgcaccgtttcaataaacgtcggcatgatggcatccacacgcgcctggcgattatcttccgtaataccctgcaccgaaaaccactgacgccccgccggattaccgctcggctccgcgccaccgacactcaccaccagcgcatccgggaacaacggtgcaaaccagctacctatttcccccattgccaccgggttatccccgacaccgtggaaaagcagtaacaactgttgcgcaggtttatccgggctttgaacaacaaaatggtcatgtttcatggcgaactccttaactgatgtcattaattttacgccgctgactcacaatgaccatgggagaaaattgaaggagtcagtgaaaaaattgccattgcgttatgcgatcgcgcagacgctcagtgcgaacatcattaagtgcgaacagcgcctgtgcggcctcttcccgctgacggaccagtaacatcttgcggcctgaaagtttaagtgtggtacataactgcgcgtcgctgacgtttttctgtaaacgcccacgcagcgccggtaatgccagttcactggtttgtagcagacgcaataagcaacctaacgatgttaatagcggacgatgagcgaaagcaaaaccggccagttcaagccagtcgtcgtcagaaaggacggcattgtttantngatcaacagggagtgtttcgccattccactgcgcgagagcttgcgcatcgcgacgtaaacggtaatgctcacgttcagccagctgtttacccgcatcactcatcggtaacagcgccatcgccgtatagcaaccgctgctggcttcacgatgattacccattcgcaccagcacaaaaccgcagcgttgccagaaacgccataactccccggtgtaaccaaaactcaccgaaagatagtcgaggccaggcctatattgcaaagcgctggcaatgagctgttgcccaacgccttcgcgctgacgcgccggatgaactgctatccggctgacccgccgtccacgcaatgtcgccgccagtggattgctgccgtgcgccgccagcgactgggccaccagattaccccgcgggcgacgaaaacctgcccataccgcctgactgagttcttgagataatccaccctcatccaccagccacagcgctccggcaatctcgttttcgccagccgcctgtaaaaaatgttgccctggtgcatccatcatgcggcgtaaatccagcggcgaagtccggtagtgcgcaccagacaataactgataaacctttaacggcgtttctggctcgcttcgccataacgtttgttcaaatgcggaaatgacgatattgccttgtggtgtatgggtgaagttttcatcgttaaaaaccagtgcctcactaaccattttttccagcgggcatccctgtgcccagcggatcggctgttgcagttcaaaacggtgtaaatgcggaaagcgagcgcaaaatttcagcaaaaaaccacgtccggtaccttcgtagccctgcaccgtagtggttaacaacgttcgaggaaaacgcgataccagttgatgcaacaacggcgcaggtatggctgcggcttcatcgaccaccagccagtcggcttgctcatcgctggctaacaaggcatccggcgcaataaagcgaaacttctcgcccgcaaattgtgccagtacatccgttgccgcttttgcggncgcagtgataatcgcactacccgcaatacgagaaatgagttgccctgccagcgccgatttaccgcgcccacgcgcagcagttaccgctgccacgcccgacggcatggtcagtagctgctgtaagatttgctgttgttctggttgtggtgcgccggtcgcggggtgccagtcagtacggggagtaaaatgcgccaacgagaacggctggttttgccgccagaagatagcgtcgttatccgccgtaagtacgcgtttgaaatgctggacaaaatgcggcgtcgcaatagggtcagggcaatcactccagcgcagcgagtcggcatcaggttggttttcccactcttcccatacagggagtaacaaaaccagccagcttcccgctttcaacgttccgctaagtgcggcaaaggcagcggcatcaaagccgtggcgggcgtcgaataccgcatgccggaactcgcgcccaagtaaagtttgtagtgccgagggagaacagtggttttcagcatctggctgcggcgaaatccacagccagtcgccaggtaaggcatcacgtaacttaagcgcatgatcaaaacaccaaccctcttccccgctcaacaccagcaagcggcggatcccttcacgtttcatttgcgctgttaatgtgtgaagcgcagtcagttcagccatccctgccccggaagttaaatgcttttaccaaaagtattgcattgtgccggatcgccgctgtcgaaaccacgtttaaaccagctgtagcgttgctgagaagtgccatgagtgaaactgtctggtactactcgcccctgactttgctgttgtaaacggtcatcgccgatggcctgcgccgcgttcagcgcctcttccagatcgccggtttccagaacgccttgctgctgcatgctatgcccccagacaccggcaaaacagtcggcctggagttccatacgcacagataagcggttcacttccgcctgcgtcgcgttttgttgcagttgacgaactttcggctcgatgcctaacagtttctgcacatgatgaccgacttcatgggcgataacgtacccctgggcaaaatcgccatccgcgccaagtttgtctttcatgtcatcatagaaggagagatcgatataaaccgtaccatccgccgggcaatagaacggccccattatggactggcccgccccgcatccggtacgcgtcattccacggtacatgaccagcttcggttgctgataggtcttacccatcttctcgaactgttgtccccaggtgtcttccgtggttgccagaatcaccgaggtgaattttgcggcttcgtcttcatttgggctaattgaccgcgttgattgctgttgagaaaccggctgcccggtcatcaacccggttaaatcaacgccatagtagcctgcaaccagcacgactatcagtaaaatcaacccgcctttaccgctcggcagacggaaaccgggaccgcccattgacggaccgccggagctattgcgcctgtcttcaacattgtcactttcacgtcgcccttgccaacgcatagatacctcaacaatatattcattatagaaatgatcgtaggtggttcagaggaagattaccacaggaaaacgggatgaaatggcggaggaatgagcgttcaatgcacatcttacgagaatggttgtcttgccgtgccagcagcacggcaagatgatgaacagaaaaatcagtccagctgtacacccaggcggcgggcgacggcttcataggcctcgatcaggccaccgaggctctggcggaaacggtctttgtccattttctccagcgtttctttgtcccacaggcggctaccgtccggggagaactcatcgcccagtaccacttcacctttgtacagaccaaactccagcttgaagtcgaccagaatcagaccagcatcatcgaacagttttttcagcacgtcgttcgctttgtaggtcagctctttcatgcgtgccaggttctctttgcttacccagccaaaggtttcgcagtaagattcgttgaccatcggatcgtgcatggcgtcgtttttcaggaacagatcgaacagcggcgggttcagctcaataccttcttcgattccaagacgtttcaccagagagccagcagcacggttacgcacgacacactcaaccggcaccatatccagctttttcaccagacattcggtatcggagagcagacgctccatttgagtcgggatacccgcttcagccagtttgctcataatgaagtagttgaacttgttgttcaccatacctttgcgatcaaactgctcaatgcgcgcgccatcccctgctgacgtatcattgcggaattcgagcaccaacaggtccgggttttccgtgctgtatacggttttcgctttaccacgatacaactcagcttgcttttgcatctttatcactcctgggtgtgaattaacgttttaaaatcttttgctgtctggtgtgccggatgttttgtcggatgcggcgtgaacgccttatccgaactacgtccgacaaacaaatttcgtgcgaattaccgctaaaatcgcgttttcctgccgacgcacacgtttgcgtatcatatcagaaaaaagggccggatgattccagccctgtatttttacttgctaaacgcagcctggaagacagctaccagcgcgtcgttctgactctgagtcagagtatgacctttcggatcgatgaactgtangctgctgcggttatctaaatcgccaacctgcagtttatagtcaccagatgccaggcctggatcgctcgcgcccagttcctgccagtcgctgtcagacagcggnttataagttacggccatgttgccctgcgaacgggtgctgtcggtcactttcatgcccactttttccagcgccgctggcagacgttgccaaaccacattgaacggcccgcgtacgaccagcattggtaaaccggtgtcatcagctgcactttgtacgtccatagtggtggaggcacgattttgcgcagcgttcgcggcgtcagtggcagatttatccagaccagcggaaataacgttcatcatctccgtgctgtaacgctgcatggaagccgcgtctgcaaccggtttgcccgcctgttccaggttcagcagtttaaccgtaaccgcctgctgataaccctgcggcttaacagagatttgataacgaccacgatactgctcgtcttcgtccagacggttccattgtacccaatcggtggtcagtgtctgaccagcatcatcacgttgggtgatggtgtagtttttcgcctgcagcacgctaaccacctgcggccacagagtattgccacgaccattttccaccagcaatgaagcggtatcgcccgtgaactgggtacgcgcgccagaaaccagtgccagcggctgggctggtggacgaatgtccagcgccttaccgacagcactactaccgttggtcaccgggattgcataatcaccggaggtcaccggcaaaatcattccagccggggcatgaagctccgcaagcggtgccgcttccaggtaggcttcatcaccactgacctgacgcttatagcgtgagtcagaactacaggcagcgagtaataaaacaagcgaaacacccgcaacctttgccaggcgcgacttttgaacagagtaagccatcaaatctccctaaactttacagcaaaccggcatgcttaagcgccgctctgaccgtctcacgaccactgtcggtgattggtgtcattggcaggcgcagcgtatcggtcgccacaagacccagttccttacatgcccatttcaccgggattggattgggttcgacaaatagtttgttgtgtaatggcatcagacgctgattaataacgcgtgcctcggcaaaatgcccttctgctgccagtttgcacatctgggccatatcacgcgctgngacgttagccgtaacggaaataaccccatgaccgcctaattgcatgaagtccagcgcgctcgcatcatcgccgctcagcagaacaaaatcatctgaaaccagctctttgatctggtttacacgcgttaagttccctgttgcctctttgattccgataatattttttactttcgccagacggcccaccgtttccgggagcagatcgcagccagtacgggacggcacattatacagaatttgcggcaggtcagtatgctcagcgatggctttgaaatgctgatacaaaccttcttgcgacggacgattgtagtaaggggttaccgtcaggcagccgacgataccactgtcattgaagcgctgcgtcaggctaatggcttccgcagtagcgttagcaccggtcccggcaatcaccggaatgcgcccgtcagccagctccagcgtcatcatcaccacatcagcatgttcgtcatgatttaaggtagcggactcgccagtggtgccaacagaaacgatcgccgaagtaccgctggcgacatgataatcaatcagttttttcaagctagcccgacagacattacctttttcatccatcggantaacaatcgcgacaatacttcccgtgaacatgggccatcctctgtgcaaacaagtgtctcaatggtacgtttggtatggcattaaaagcaagcagacagaaccgttctgattgttgtatgcatgttttttttatgctttccttaagaacaactcaccccttaaaggaataaccagtttgacactgtcatcgcaacattatctggtgatcactgcgttgggtgccgatcgccctggaattgtgaacaccatcacccgtcatgtcagtagttgcggctgtaatattgaagacagtcgcctggcgatgctgggagaagagttcacgtttatcatgctgctttccggttcatggaatgccattactctgattgaatcaacgttaccgttgaaaggtgccgaactggatcttttaatcgtgatgaagcgcacgacggcgcgtccgcgtccgccaatgccagcatctgtctgggttcaggtcgatgtggcagactccccgcatttaattgaacgcttcacagcacttttcgacgcgcatcatatgaacattgcggagctggtgtcgcgcacacaacctgctgaaaatgaacgggctgcgcagttgcatattcagattactgcccacagccccgcatctgcggacgcagcaaatattgagcaagcgttcaaagccctatgtacagaactcaatgcacaaggcagtattaacgtcgtcaattattcccaacatgatgaacaggatggagttaagtaatgaatccactgaaagccggtgatatcgcaccgaaatttagcttgccggatcaagacggagaacaagttaatttgaccgacttccagggacagcgtgttctggtttatttctacccgaaagccatgacccccggctgtaccgtacaggcctgcggcttacgcgataacatggatgagttgaaaaaagcgggcgttgatgtgctgggtatcagcaccgataaacccgaaaaactctcccgttttgcggaaaaagagctgcttaactttacgctcctgtctgatgaggaccaccaggtgtgcgagcaattcggcgtctggggggaaaagtccttcatgggcaaaacctacgatggtattcatcgcatcagcttcctgattgacgctgatggcaaaatcgaacatgtctttgacgatttcaaaaccagcaatcaccacgacgttgtgctgaactggctgaaagaacacgcctgattactttgctccattccgtgctggctgcgcttgcggtcagcacacctcacttatcgtgatcaagatcacattctcactttcccctgcgacacgggtgtcgaatccattttttgctgaacgttaatgaccatcatttttgtaccgttcagaattcagttaattcataacttattgaatatattaaattaatcatactggcatcctttatgcattatgaaatgcaatgtttcatatcattttcaaggagccgacatgaaccgctttgtggtggccgaaccactgtggtgtacaggatgtaatacctgtctcgctgcctgttcggacgtgcataaaacgcaaggtttacagcaacacccgcgcctggccctggcgaagacgtcaacactcactgcccctgtcgtgtgtcatcactgtgaggaagccccttgcgtgcaggtctgcccggtcaatgccatctcccagagggatgatgcgatccaactcaacgaaagcctctgtattggctgcaagctttgcgccgtggtctgcccatttggcgcaatcagcgcttcaggaagccgtccggtgaatgcccctgcgcaatatgtttttcaggctgaaggctcactcaaagacggcgaagaaaacgcgccaacacaacatgctttgctgcgctgggaaccgggtgtccagaccgtcgcggtgaaatgcgacctgtgtgatttcttgccagaaggtcctgcctgcgttcgcgcttgcccgaatcaggcgttacggctgatcaccgacgatagcctgcaacgtcagatgaaagaaaaacagcgccttgccgcaagctggtttgccaatggcagggaggatcccctttccctcactcaggagcaacgctaatggatgccctgcaattattaacctggtcgctgatcctctatctgtttgccagtctggcttcgctgtttttactcggtctggacagactggctattaagctttccggcatcacatcgctggtgggcggcgtgattggcatcatcagcggaattacgcaattacatgaaggcgtaactttagtcgcccgttttgccaccccttttgactttgccgatttaaccctgcgaatggatagcctctcggcatttatggtgctggttatctccttgctggtggtggtttgttcgctctattcattgacttatatgcgcgaatacnagggcaaaggcgcggcggcgatgggcttctttatgaatattttcatcncatcnatggttgccctgctggtgatggacaacgctttttggttcatcgtgctgtttgaaatgatgtcgctgtcttcctggtttctggtcattgccaggcaggataaaacgtcgatcaacgctggcatgctctacttttttatcgcccacgccggatcggtgctgattatgatcgccttcttgctgatggggcgcgaaagcggcagcctagattttgccagtttccgcacgctttcactttctccggggctggcgtcggcggtgttcctgctggcctttttcggttttggcgcgaaagccgggatgatgccgttgcacagctggttgccgcgcgctcaccctgccgcaccatcgcacgcttcggcgttgatgtctggcgtaatggtcaaaatcggtattttcggcatcctgaaagtggcgatggttctgctggcgcaaacgggtttgccgctgtggtggggcattctggtgatggcgatcggcgcaatctccgcgctcctgggcgtgctgtatacgctggcggaacaggatatcaaacggctgctggcctggagtaccgtcgaaaacgtcggcattattttgctggcagtcggtgtggcgatggtcggtctgtcactgcacgacccgctgctcaccgtggttggactgctcggcgcactgtttcatctgctcaaccatgcgctgttcaaagggctgctatttctcggcgcgggcgcgattatttcgcgtttgcatacccacgacatggaaaaaatgggggcactggcgaaacggatgccgtggacagccgcagcatgcctgattggttgcctcgcgatatcagcccttcctccgctgaatggttttatcagcgaatggtacacctggcagtcgctgttctcactaagtcgtgtggaagccgtagcgctacaacttgcgggtcctattgctatggtgatgctggcagtcactggtgggctggcagtaatgtgcttcgtcaaaatgtacggtattactttctgtggtgcgccgcgcagtacacacgctgaagaggcacaggaagtgccaaatacgatgatcgtcgccatgctactgctcgcggcactctgcgtattaattgcgcttagtgccagttggctggcaccgaagataatgcatattgcccatgcgtttaccaatacccctcccgtcactgtcgccagcggaatagcacttgtacccggcacgtttcatacacaggtcaccccctcattactgttgctgttactactggcgatgcctttgcngcctggccttnactggctgtggtgtcgttcgcgccgcgcagcgtttcgtcgcacaggagatgcctgggcatgcggctacggctgggaaaatgcgatggccccgtcaggcaatggcgtgatgcagccgctgcgtgtggtcttctctgcgctatttcgtctacgacaacagctcgaccctacgctgaggctaaataaaggtcttgcgcacgtcaccgccagggctcagagcacagaacccttctgggatgagcgggtgatccgccccatcgtgagcgccacccaacggctggccaaagaaatacagcatctgcaaagcggcgactttcgtctctattgcctgtatgtggtcgccgcactggttgtgctgctaatcgctattgccgtctaaggaaatcaccatgagacaaactctttgcgacggatatctggtcatttttgcgttagcacaggccgtgattctgctgatgctaaccccgctttttacgggtatttcccggcagatacgcgnnnnnnnnnactcccgccgcgggccggggatctggcaggattatcgcgatatccacaaactgtttaaacgccaggaagttgcgcctatatcttcaggtctgatgttccgcctgatgccgtgggtattaatcagcagcatgctggtgctggcgatggccctaccactatttattaccgtttccccttttgcggnnnncggcgatctgatcacccttatctatcttcttgccctgtttcgttttttctttgctctttccgggctggataccggaagcccgtttgcgggagtcggtgccagtcgcgagttgacgctcggcattctggtcgaaccaatgctcattctctcactgctggtattggcgctgatagcaggttccacgcatatcgagatgatcagcaatacgctggcaacgggctggaactcgccgctaaccaccgtactggcgttactggcctgtggttttgcctgcttcattgagatgggaaaaattccctttgatgttgctgaagcagaacaggaattacaggaaggcccgctgacagaatattccggtgccgggctggcgctggcgaaatgggggctggggctgaaacaggtcgtgatggcagcactgtttgtggccctgtttctgccctttgggtgcgcgcaagaactttctctcgcctgcctgctgacttcacttgtcgttacgctgctcaaggttttgctgatttttgtactggcctcaatcgcagaaaacacgctggcacgcgggcgttttttactcattcaccatgtgacctggcttggcttcagccttgctgcgcttgcatgagtcttctggttaaccggtctgtaaggagcactgacggaatatggaaaatcttgctctgacgacgttattgctgccttttatcggcgcactggtcgtttcgttttcgccacaacgtcgggccgccgaatggggggttttgttcgccgcgctgaccacgctgtgcatgttgtcgctgatctccgcgttttatcaggccgataaagttgccgtcacgttgacgttggtcaacgtgggggatgtggcattgtttggcctggtcattgatcgcgtgtgtacgctgattctgtttgtggtggtgtttctcggtttgctggtcacgatctactccacgggttatctgacggataaaaatcgcgaacacccgcataacggcacgaatcgttattacgcatttttgctggtgtttatcggcgcgatggcgggactggtactctcctcgacgctgctcggtcagttgttgttttttgaaattacgggcggctgctcctgggcgttgatcagttattatcagagcgataaagcgcagcgttcagcactaaaagcgttgcttatcacccatatcggttcgttggggttgtatcttgccgccgccacgctgtttttgcagaccggaacgtttgcgcttagcgcgatgagcgagttacacggcgacgcacgttatctggtttatggcggcatcctgtttgccgcgtgggggaaatcggcccagctaccgatgcaagcgtggctaccggacgcaatggaagcgccaacaccgatcagcgcctatctccacgccgcatcgatggtgaaagtgggcgtttacatttttgcccgcgccattatcaacggcggcaatatcccgcatgtgattggcggcgttggcatggtcatggccctggtcaccattctttatggatttctgatgtatttgccacagcaggatatgaagcggttgctggcctggtcgaccatcactcaacttggctggatgttcttcggcttgtcgctctccatcttcggctcgcggctggcgctggagggcagcatcgcctacatcgtcaaccacgcgttcgctaaaagcctgtttttccttgtagcaggtgcgctgagttacagctgcggcacgcgcttgttgccgcgtctgcgtggcgtattgcacaccctgccgttgccaggcgtgggtttctgcgtggcagcgctggcgattaccggcgtaccgccgttcaacggcttcttcagtaaattcccgctgtttgctgccggttttgcgttgtcagtggagtactggatcctgctgcccgccatgattctgctgatgattgaatcggtcgccagtttcgcctggtttattcgctggtttggtcgcgtcgtccccggcaaaccgagcgaggccgtcgccgatgccgcaccgctgccagggtcaatgcgcctggtgctgattgtactgattgtgatgtcgctgatttccagcgtaatcgccgcgacctggttgcagtaaggagatgatgaatgaccggttctatgatcgtaaataatctggcgggactgatgatgctgacatcgctgtttgtgattagcgtcaaaagctatcgcctgtcatgcggattttacgcctgccagtcgctggtgctngtgtctattttcgccaccctctcgtgcctgttcgccgcagagcaactgctgatctggtccgccagcgcctttatcaccaaagtgctgctggtaccgttaatcatgacttacgctgcacgaaatattccccagaacatcccggaaaaagcgttattcggtccggcaatgatggcactgctcgcggcgttaattgtcctgctttgcgcatttgtcgttcagcccgtgaagctaccgatggctaccgggctgaaaccagcgctggcggtggcgttaggtcattttctgcttggcctgctgtgcattgttagccagcgcaatatcctgcggcaaatttttggttactgcctgatggaaaacggctcccatctggtgctggcgcttctagcctggcgtgcaccggaactggtggaaattggtatcgctaccgacgccatcttcgccgtcattgtgatggtgttactggcaagaaaaatatggcgtacccacggcacgctggacgtgaacaacttgaccgcgctgaagggataatgagatgagttattctgtgatgttcgctttactcctgctcactccgctgcttttttcgctgctctgttttgcctgccggaaacganggcactctgcgactcgcacggtgacagtattacatagcttagggatcacactgctgctgattctggcactctgggtggtccaaactgccgctgatgcaggagaaatattcgctgcgggactgtggcttcatattgatggtctgggcggtttgttcctcgccattcttggtgtgattggctttctcaccggtgtttactcgattggctacatgcgtcatgaagttgagcacggcgagctttcacccgttacgctgtgcgattactacggtttcttccatctgtttttgttcaccatgctgctggttgttaccagcaataacctgattgtgatgtgggcggcgatcgaagccaccaccttaagctcggcgtttctggtaggcatttacggtcagcgttcatcgctggaagcagcatggaagtacatcattatttgtactgttggtgtcgcttttggtctgttcggtaccgtgctggtatacgccaacgccgccagcgttatgccgcaggcagaaatggcgatattctggagcgaggttcttaagcaatcgtccttgcttgatccaacattaatgctgttggcctttgtgtttgtgctaattggctttggtaccaaaaccgggctatttcccatgcacgcctggctgccggatgctcacagtgaagcgccgagtccggtcagcgccctactctccgccgtattgctgaactgcgcgctgttggtgctgattcgctattacatcattatttgccaggccatcggcagcgatttccccaaccggttgttgctcatcttcggcatgttgtcggttgccgtggcggcatttttcattctggtacagcgggacattaagcgtctgctggcgtactccagcgtggagaacatgggactggtcgcggtggcgctaggcattggcgggccgctgggaatttttgccgcgctgctgcacaccttaaaccacagtctggcaaaaacgctgctgttctgcggttccggcaatgtactgctcaagtacggcacgcgcgatctcaacgtcgtctgtgggatgctcaaaatcatgccatttaccgccgtgctgtttggcggcggtgcgctggcgctggcagggatgccgcccttcaacatttttcttagcgaatttatgaccgttaccgccggactggcacgtaatcacctgctgattatcgtcctgctgttattgctgttaacgctggtgctggcgggcctggtacngatggctgcgcgggtgttaatggcgaaaccgccgcaggccgttaaccggggtgatctcggctggttgaccacctcgccaatggtgattctgctggtcatgatgctggcgatgggaacgcatattccacaacctgtcatcaggatcctggcgggcgnttccactatagtcctctcagggacgcacgacctgcctgcacaacgtagcacctggcatgattttttgccttcaggcaccgcatctgtttcggagaaacacagtgaacgttaattcatcgtcaaatcgtggcgaagcgattctcgccgccctgaaaacgcagttccccggcgcggtgctggatgaagagcgacaaacgcctgaacaggtcaccattacggtgaaaatcaatctgctgcctgacgttgtacagtatctttattatcaacatgatggctggcttccggtcctgtttggcaacgacgagcggacacttaacggtcattacgcggtttattatgccctttcaatggaaggggccgaaaaatgctggattgtggtgaaggcgctggtcgatgccgacagtcgggagtttccgtcagtcacaccgcgcgtccctgccgcggtctggggcgagcgagaaattcgtgatatgtacgggctgattccggttggcctgccggatcagcgtcgcctggtgttgcccgatgactggccggaagatatgcatccgctgcgcaaagatgcgatggattatcgactgcgccctgaaccgacgactgattccgaaacgtatccgtttatcaatgagggcaacagcggtgcgcgggtgatccctgtcggcccgctgcatatcacctccgatgaaccgggtcacttccgcttgtttgtggatggcgagcaaattgtcgatgctgattaccgtctgttttatgtccatcgcggcatggagaaactggcagaaacgcggatgggctacaacgaagtgaccttcttatcggaccgcgtgtgtgggatttgcggttttgcccacagtgtggcctataccaactcggttgaaaatgcactggggattgaggtgccgcaacgagcgcataccattcgctcgattctgctggaagtcgaacggctacacagtcatttgctcaaccttggcctctcctgccattttgttggatttgataccggctttatgcaatttttccgcgtgcgggaaaagtcgatgacaatggcggaattgctgaccgggtcgcgtaaaacctacggtctgaatctgattggtggtgttcgccgcgatattctcaaagagcaacgtctgcaaacgctgaaactggtgcgcgagatgcgcgccgacgtgtcggagctggtagaaatgctgcttgccacgccgaatatggaacaacgcactcagggcattggcattctcgaccgacaaatcgcccgtgattatagccctgtagggccgctgatccgcggcagtggttttgcccgtgatttgcgctttgatcacccctacgccgactacggcaatattccaaaaacactgtttaccttcaccggcggcgatgttttctcccgcgtgatggtccgtgtcaaagagacgtttgattcgctggcaatgctggaatttgctctcgacaacatgccggataccccactgctgaccgaaggctttagctataaacctcacgcattcgcgctcggctttgttgaagcgccacgcggtgaagacgtgcactggagcatgctcggtgataaccaaaaattgttccgctggcgctgccgtgccgccacctacgccaactggccggtgttgcgttacatgctgcgcggcaataccgtttctgacgcaccgctgattatcggtagccttgatccctgctactcctgtaccgaccgtgtgacgctggttgatgtgcgcaagcgccagtcaaaaaccgtgccgtataaagagatcgaacgctacggcattgatcgtaaccgttcgccgctgaagtaaggacagaagatgctgaagttactgaaaactattatgcgcgccggaaccgcgacggtgaaatatcccttcgcgccactggaggtcagcccaggctttcgcgggaaaccggacctgatgcccagccaatgtattgcctgtggtgcctgcgcctgtgcttgtccgacaaatgcgctgactatccagaccgacgaccagcaaaattcgcgcacctggcagctctatctggggcgttgtatttactgcggacgttgtgaagaagtgtgcccgaccagagccatccagcttaccaataactttgaactgaccgtcaccaataaagccgatctctatacccgcgcgacgttccatctacaacgttgcagccgttgcgaacgcccgttnnnnccgcaaaaaaccgtcgcactggctgctgaattgttggcacagcaacaaaatgcgccacaaaaccgcgaaatgttgcgggcgcaagcgagcgtctgcccggagtgcaaacaacgcgcgacgctgatcaacgacgatacagatgtaccgctggtggctaaggagcagctatgagtccagtgcttacacaacatgtcagccagcccatcacgctggacgagcaaacgcaaaagatgaagcggcatttgctacaggatatccgtcgctcagcctacgtttatcgcgtcgattgcggcggctgcaacgcctgtgaaatcgaaatttttgccgccatcacacccgtattcgacgcagaacgttttggcattaaggttgtttcatcaccgcgtcacgccgatattttgttatttactggcgcagtcacccgggcgatgcgtatgcctgcacttcgggcgtatgagtctgcccccgatcataaaatctgtgtttcctacggcgcgtgcggtgtcggcggcggtattttccacgatctctacagcgtctggggcggcagcgacaccattgtccccattgatgtttggatccccggctgcccgccaacaccggccgccaccattcacggtttcgccgtggcgctcggtttgctgcaacagaagattcacgcggtggattatcgcgatcccaccggggtgactatgcaaccgttgtggccgcagatcccgccatcacagcgtatcgccattgagcgagaagcgcggcggctggcgggctatngtcaggggcaagaaatttgcgatcggctcctgcgccatttaagcgacgatcctacaggaaatcgggttaacacctggttgcgcgatgccgacgctccacgtctcaatagtatcgttcagcaactctttcgcgtactccgggggttacatgactgaagagtgcggggaaattgttttctggacgctgcgaaaaaagtttgtcgccagtagcgacgagatgccggaacacagctcccaggtaatgtattactcgctggctatcggtcatcacgttggcgtgattgattgtctgaatgtcaccttccgctgcccactgacggaatacgaagattggcttgcactggtcgaagaggagcaagcccgacgtaagatgctgggggtgatgacttttggtgagattgttattgacgccagccacaccgccctgttgacccgggcattcgcgccactggcagatgacgcgacgtctgtgtggcaagcgcgtagcattcaattcattcatctgttggatgaaattgtgctggaaccggctatctatctgatggccagaaaaattgcgtgagaaggatttctcattaataaggactgttgatggctatgtcagacgaggcgatgtttgccccgccgcaaggaataacaattgaagcggtaaacggaatgctcgcggagcggttagcgcagaaacacggcaaggcgtctttattacgcgccttcatcccgctgccgccgccgttcagcccggtacaacttattgaactgcatgttctcaaaagcaacttctattaccgctaccatgatgatggcagcgatgtgacggcaacaacagagtatcagggcgagatggtcgattattcgcgtcacgccgtccttctcggcagtagtggaatggcggagctacgctttattcgcacccacggcagtcgttttactccccaggattgcacactgtttaactggctggcacgcattatcaccccggttctgcaatcatggctcaatgatgaagaacaacaggtggcgctgcgtttgctggagaaagatcgcgatcatcatcgggtactggtggatatcactaatgcagtgctgtcacatcttgatctcgacgatctgatcgctgacgtcgctcgtgagatccatcattttttcggtctggcttcagtcagtatggtactgggcgatcatcgaaagaacgagaagttcagcctgtggtgcagcgatctttctgcctcacattgtgcgtgtctgccacgcaatatgcctggcgacagtgtattgctgacacaaacgctacaaacccgacaaccgaccttgacgcaccgtgcagacgatctgtttctctggcaacgcgacccgttattacacttacttgcatctaacggctgcgaatcttcgctcctgataccgcttacctttggcaaccatacaccgggtgcattgttgctggcgcatacctctaccactctctttagtgaggaaaactgccagctactacaacacatagccgatcgcatcgctattgccgttggcaatgccgatgcctggcgtagcatgaccgatttgcaggaaagtttgcagcaagaaaaccaccagcttagcgagcagctcctttcgaatctgggcgtcggtgacattatctatcaaagccaggcaatggaagacctgctccagcaggtagatattgtggcgaagagcgacagtacggtgttgatttgtggtgaaaccggaaccggcaaagaggtgatcgccagagcgatccatcaacttagcccgcgacgcgacaagccgctggtcaaaatcaactgcgctgccatccccgccagtcttctggaaagtgagttattcggtcatgacaaaggggcctttactggtgcgattaatacccatcgtggtcgttttgaaattgccgatggcggtacgttgtttctcgatgaaattggcgatctgccgttagaacttcagcctaaattgctgcgcgtattgcaggagcgggaaattgagcgtctcggcgggagtagaacgatcccggtgaatgtcagagtcattgccgccaccaaccgtgatttgtggcaaatggttgaagatcgccagtttcgcagcgatctcttttatcgcctgaatgtcttcccactggaattgccgccgctgcgagaccgtccggaagatatccctcttttagcaaaacatttcacgcaaaaannnnnnngccatatgaatcgcgcaattgacgccatcccgaccgaggcactacgccagttgatgtcgtgggattggccgggcaacgtgcgcgagctggaaaacgtgattgagcgagcggtactgctgactcgcggtaacagtctgaatttacatcttaatgtccgacaaagccgtttactgccgacgctaaatgaagattcagcgcttcgcagttcaatggcgcagttgctgcacccgacgacgccagagaatgacgaagaagaacgtcagcgcattgttcaggtattgcgagaaaccaatggcattgttgccgggccccgtggcgcggcgacacgattagggatgaagcgcaccacgctgctgtcacngnnnnnnnncgtctggggatctcggttcgcgaggtgttgtaatctgcttttgcaggagtatgcatgagaaacaaactctctttcgacttgcagttgagcgccagaaaagcggcaatcgctgaacggattgccgcccataaaattgcccgcagtaaagtgtcggtctttttaatggcgatgtccgctggcgtgtttatggcgatcggatttactttttacctttccgttatcgccgatgccccgtcttcacaggcattaacccatctggtgggcggcctttgctttacactcggctttattttgctggcggtttgcggcaccagcctgttcacctcgtcggtaatgacggtgatggcaaaaagtcggggcgttattagttggcgaacttggctgattaacgcacttctggtggcctgcggtaatctggcaggtattgcctgtttcagtttgttaatctggttttccgggctggtgatgagtgaaaacgcgatgtggggagtcgcggttttacactgcgccgagggcaaaatgcatcatacatttactgaatctgtcagcctcggcattatgtgcaatctgatggtttgcctggcgctgtggatgagttattgcgggcgttcgttatgcgacaaaatcgtcgccatgattttgcccatcaccctgtttgtcgccagtggctttgagcactgtatcgccaatttgtttgtgattccgttcgccattgccattcgccatttcgcccctacctccttctggcaactggcgcacagtagcgcagacaattttcctgcactgacggtcagccattttattaccgccaatctgctcccggtgatgctgggtaatattatcggcggtgcagtgctggtgagtatttgttatcgggctatttatttacgtcaggaatcctgaaaaatcagcccggcgaaacagttcgtcgggctgaagattattcttgcgctatttgcccatcgggccaggcgtggatcacggctttgatcagcgtcgccaatggaatggcgaagaatacgccccagaatccccacaaaccaccgaagatcaccaccgatnaaataatcaccagcggatgcaggttaaccgcttcggagaacaacaccggtactaacaggttgccgtcaagcgcctgaatgatcagatacaccgcgaaacagctccagaattcagtgcctgcaccaaactggaatagcgccacgccaaccaccggaatggtcaccacaaatgcgccaatgtacggaataagtaccgagaagccgaccagcaccgccagcagcagcgaatagttcagcccgaagagtaagaatcccagccaggtggcgatccctactacgatcatctccagcactttgccgcggatatagttggtgatttgttgattcatctccttccacacctgtcntgccagtccacggttacgcggcagcacccggcgaacggcattcagcatctgctctttgtctttcagcaggaagaagaccatcaatggtaccagcaccagatagacggcaatggtcagcaaaccgaccagcgaggcgagggaaattttcaccaccgaatcgcccatggtcagcatccgactgcgcatattttcggccattgcatcaataatgcccgcatccattaacgccggatagcggcgcggcaacgtggcggcaaagtcagaaagcttattgagcatccccggcatatcgcggattaagtagatgccctgctgccaggcgataggcagtaccacgaacgccatcagtagcaatataccgacgaaaaccaccaatacaatcgacgtcgcccagcggcgggagcagccaatagattgcaggcgcacggttggccattccagcaaataggccagcacaatagccaccagcaacggagcaagcaggccactaaagaaaaagataatgccaaatccggcaactaaaataaccagcaaggcaatcgcttccgggtcgctaaaacggcggcgataccattgcatcaacatttcgagcataaagaccttccctgaacctcaagagcgggattgcgatccgcaattgtatcgaaatgtcacaaaaaagacttcgctttttatgacggattcaggaaactgaaaagtcatttgagtgggctaatcttcgccgttacactcaaaggcggcgcggtgggaacgatatttcacagtatcggtcaaatgactatcttcagaaatacaggatagaggttatgttcaggcagttgaaaaaaaacctggttgcaaccctcattgctgctatgaccattggtcaggtagccccggcatttgccgacagcgcagacaccttgccggatatgggaacctccgcaggaagcacgctttccattggtcaggaaatgcagatgggcgactattatgtccgccagctacgnggcagcgcgccgttaattaatgacccgctgttaacgcaatatattaattcgctggggatgcgtctggtttcgcatgccaattcggttaagacaccgtttcatttctttctgatcaacaacgacgaaattaacgcctttgctttctttggcggcaacgtggtgctgcactctgccctgttccgttattccgataacgaaagtcaactggcttcagttatggcgcacgaaatctcccacgtcacccaacgtcacctggcgcgagcgatggaagatcagcagcgcagcgcgccgctgacctgggtcggcgcgttaggttctattttactggcgatggccagtccgcaggcggggatggcggcgctgaccggtacactggcgggaacgcgtcaggggatgatcagtttcacccagcaaaatgaacaggaagcggaccgcattggtattcaggtgctgcaacgctcgggattcgatccgcaggcgatgccaaccttcctcgaaaaattactcgatcaggcgcgttactcctcgcgcccgccggaaattttactgactcacccgttgccggaaagtcgtctggcagatgcccgcaaccgtgctaatcagatgcgcccgatggtggtgcagtcgtcggaagatttctatctggcgaaagcgcgcacactggggatgtataattccggacgtaaccagctcaccagtgatttgctggatgaatgggcgaaaggaaacgttcgtcagcaacgagcggcgcaatatggtcgtgctttacaggcgatggaagccaataaatacgacgaggcgcgaaaaacgctgcaaccgttactggcggcagaacctggcaacgcatggtatctcgatctggctactgatatcgatcttgggcaaaacaaagccaatgaggcgatcaatcgtctgaaaaatgcccgcgatttgcgcaccaatcctgtgttgcagctcaacctggcgaacgcttatctacaaggcggtcaaccacaagaagcggccaatattcttaatcgctacacctttaataataaagatgacagcaacggctgggatttgctggcacaggcggaagccgcgctaaataaccgcgatcaggagctggctgcgcgagcagaaggttatgcgctcgccggacgactcgatcaggccatttcgctgttgagtagcgccagttcgcaggtgaaattaggcagcctgcaacaagcgcgttacgatgcgcgcatcgaccagttgcgccagctgcaggaacgctttaagccttataccaagatgtaattcgcattaaaggaagaacaatgaccaaacaggtaaaaatctaccataacccacgctgttcaaagagccgggaaacgctgaacctgctgaaagaaaacggcgtggagccagaagtggtgctctaccttgagacacccgccgatgcggcaacgctgcgcgatttgctgaaaatgctggggatgaatagcgcccgtgaattgatgcgccagaaagaggatctttataaagaactgaacctggctgacagttcgcttagcgaagaggcgctgattcaggcaatggtggataatccgaagctgatggagcgcccgattgtggtcgcgaatggcaaagcgcggattggtcgtccaccggagcaggtactggaaatcgtgggttaagatgtgctccatcgctagttgaagcacattgccggatgcgacgcttgccacgtcttatccggcctacgaattctatggattaacttcgcgtagttcggataaggcgttcgcgccgcatccgacaataaacaccttatctacaacttcagaatttctttcacaaacggaatggtcagcttacgttgcgcggtaatcgacgcacgatccaactgatccaacgtcataaatagcgtgcgcatttctctgtcgagccgcttcagcaagaaacgccccacatcttccggcagttcaaaaccacgcaaacgcnngcgtaactgtagcgcctgcaacttatcttcatcagaaagtggctgcaatttgtagatctgcccccagtcgagtcgcgacgcgagatccggtaatcccagattcaactgccgcggtggacgatcgccggtgatcaacaaccgtgttttgcccgattccagaattcgattgtagagatcgaaaatcgccatctcccacaactcatcgcctgcaatacactcaatgttgtcgatacagaccagcgacaaatgctccataccgtcgagcacttccggaacaaaccaggtgcgtttatccagcgggacatagcccaccgcatcgccacgctgcgacaattccgcgcaagccgcgtgcagcagatggctgcgccccgcgccttcgcgtgcccagagatagatgtaaccgctatgttcctgacgcagcacgttttgcagcgcggccagtaaagaggagttatcccccggccagaaacttgcaaaggtttcgtcgtcaggaagataaagtggcaaagagagctgtgccggtgtgttcagagatacntcaaccaggatttcacaaaatcgcgagaagtttaccacagaatcccatgatgtttgaaccgggcagcaacactgcccggtcggtacattatttgtctgttatatccgcgtcttctgcgtccagcaccacttcttcagggcgcagcacactaatcagtttgaaaatcaaacttaagccgataccgacgatggtcgccagcgccatacctttcagctccgccgcgccaatgtttaccttcgcgccactgacgccgatgatcaaaatcacggaagtcaggatcaggttctgtgctttgttgtaatccactttcgattcgatcaaaacacgaataccggaagcaccgatgacaccataaagcagcagcgaaacgccgcccatcaccggcaatgggatcatctggatagcggcagccagtttaccgacgcaggaaagcaggatagcgaaaatcgccgccccgccgataacccaagtactgtaaacacgggtgatcgccatcacgccaatgttttccccgtaggtggtgtttggcgtggagccaaagaagccggagatcacggtcgacaagccgttagcaaacatcgaacggtgcagacctggatcgcgcagcagatcttttttgacgatattagccgttactaccaggtgccctacgtgttcggcaataaccactaacgccgctggcagaatagtcagaatggcaaaccactcgaagcgcggcgtatagagggttggcagcgcaaaccagtgagcattaataatcggcgtggtatcgacaattcccattgcgaaagagagcgcgtaccccaccagcacgccaattaaaatcgggataattgccaggaaaccacggaacagcacggaacctaaaaccgtgaccgccagggtggtaatagagatgatgatggttttggagtctggcgtttgcccttcagccgggagtaaacccgccataccggcagctacgcccgccagctccagaccgatgacggcaacgattgcgcccattgccgcaggtggaaacagcacgtccagccagccggtccccgctttcttcacgataaaagaaaccaggcagaacagcacgccgcacataataaagccgcccagcgcgacttcataccctaacggcaacagtaacaataccggtgaaataaaggcaaagctggaaccaagataagccggaattttccctttacagatgaagagatacagcagcgttccaataccgttaaataacagtacagtcgccgggttaatatgaaataagacgggcaccaggacggttgcaccaaacatggcgaacaaatgttgcaaactaagcgggattgtctgtaaaagtggcggtctttcactcaccccgatagcacggcgcgtcatagtattatcctctgtattatgtgttataggcgctttactcaaaaaaaagccgnnnnnnnnagtcggctttaattatttttattctttatttcgtaccaaagattttgtcaccggcatcgccgaggcccggaataatgtatccgtgctcgttcagtccctgatcaatcgatgcggtatacagttcgacgtccgggtgcgctttttccagcgcagcgataccttctggcgcagctaccagcaccagaactttgatgctgctgcagcccgcttttttcagcaggtcgatggtcgcaataacggaaccaccggttgccagcattgggtcaacgatcagcgccatacgctcatcgatgttagaaaccagtttctggaagtacggtaccggctccagcgtttcttcattacggtacataccgacaacgctgatgcgcgcgctcggaacgttttccagcacaccgtccatcatccccagacccgcacgcagaattggcacaacggtaattttcttacctttgatctggtcgatttctaccgggccgttccagccttcgatagttactttttccgtttcgaggtcggcggtcgcttcgtaagtcagcaggctacccacttcggaagcgagttcgcgaaagcgcttggtgctgatatcttgctcacgcatcagtcccagcttgtgtttgacgagtgggtgtttgacttccacgatcttcatactctttctcctttgaggggcagccacaaaaaaaatngacggattatacctcctttcttcaaggcggcaatattattttcgttgactttagtcaaaatgataacggtttgagataaagttattttatattcaaatggttatgaaagaagattattccatccgaaaactaacctttgccctggcacaagtcttctttcgccgcgcgcctggggaaaagacgtgcaaaaaggttgtgtaaagcagtctcgcaaacgtttgctttccctgttagaattgcgccgaattttatttttctaccgcaagtaacgcgtggggacccaagcagtgaccgataaaacctctcttagctacaaagatgccggtgttgatattgacgcgggtaatgctctggttggaagaatcaaaggcgtagtgaagaaaacgcgtcgtccggaagtgatgggcggtctgggcggcttcggtgcgctgtgtgcattgccgcaaaaatatcgtgaacccgtgctggtttccggcactgacggcgtaggtaccaagctgcgtctggcaatggacttaaaacgtcacgacaccattggtattgatctggtcgccatgtgcgttaatgacctggtggtgcaaggtgcagaaccgctgtttttcctcgactattacgcaaccggaaaactggatgttgataccgcttcagcggtgatcagcggcattgcggaaggttgtctgcaatcgggctgttcactggtgggtggcgaaacggcagaaatgccggggatgtatcacggtgaggattacgatgtcgcgggtttctgcgtgggcgtggtagaaaaatcagaaatcatcgacggctctaaagtcagcgacggngatgtgctgattgcactcggttccagcggtccgcactcgaacggntattcgctggtgcgcaaaattcttgaagtcagcggttgtgatccgcaaaccaccgaacttgatggtaagccattagccgatcatctgctggcaccgacccgcatttacgtgaagtcagtgctggagttgattgaaaaggtcgatgttaatgccattgcgcacctgaccggcggcggcttttgggaaaacattccgcgcgtattgccagataatacccaggcagtgattgatgaatcctcctggcagtggccggaagtgttcaactggctgcaaacggctggtaacgttgagcgccatgaaatgtatcgcaccttcaactgcggcgtcgggatgattattgccctgcctgctccggaagtggacaaagccctcgccctgntcaatgccaacggtgaaaacgcgtggaaaatcggtatcatcaaagcctctgattccgaacaacgcgtggttatcgaataatgaatattgtggtgcttatttccggcaacggaagtaatttgcaggcaattattgacgcctgtaaaaccaacaaaattaaaggcaccgtacgggcagttttcagcaataaggccgacgcgttcggccttgaacgcgcccgccaggcgggtattgcaacgcatacgctcatcgccagcgcgtttgacagtcgtgaagcctatgaccgggagttgattcatgaaatcgacatgtacgcacccgatgtggtcgtgctggctggttttatgcgcattctcagcccggcatttgtctcccactatgccgggcgtttgctgaacattcaccnttctctgctgccgaaatatcccggattacatacccatcgtcaggcgctggaaaatggcgatgaagagcacggtacatcggtgcatttcgtcaccgatgaactggacggtggcccggttattttacaggcgaaagtcccggtatttgctggtgatacggaggatgacgtcaccgcccgcgtgcaaacccaggaacacgccatttatccactggtgattagctggtttgccgatggtcgtctgaaaatgcacgaaaacgccgcgtggctggatggtcaacgtctgccgccgcagggctacgctgccgacgagtaatgccccgtagttaaagcgccagctctgccgctggcgtttttcaattcacctgtaaatcgcaagctccagcagtttttttcccccttttctggcatagttggacatctgccaatattgctcgccataatatccaggcagtgtcccgtgaataaaacggagtaaaagtggtaatgggtcaggaaaagctatacatcgaaaaagagctcagttggttatcgttcaatgaacgcgtgcttcaggaagcggcggacaaatctaacccgctgattgaaaggatgcgtttcctggggatctattccaataaccttgatgagttctataaagtccgcttcgctgaactgaagcgacgcatcattattagcgaagaacaaggctccaactctcattcccgccatttactgggcaaaattcagtcccgggtgctgaaagccgatcaggaattcgacggcctctacaacgagctattgctggagatggcgcgcaaccagatcttcctgattaatgaacgccagctctccgtcaatcaacaaaactggctgcgtcattattttaagcagtatctgcgtcagcacattacgccgattttaatcaatcctgacactgacttagtgcagttcctgaaagatgattacacctatctggcggtggaaattatccgtggcgataccatccgttacgcgcttctggagatcccatcagataaagtgccgcgctttgtgaatttaccgccagaagcgccgcgtcgacgcaagccaatgattcttctggataacattctgcgttactgccttgatgatattttcaaaggcttctttgattatgacgcgctgaatgcctattcaatgaagatgacccgcgatgccgaatacgatttagtgcatgagatggaagccagcctgatggagttgatgtcttccagtctcaagcagcgtttaactgctgagccggtgcgttttgtttatcagcgcgatatgcccaatgcgctggttgaagtgttacgcgaaaaactgactatttcccgctacgactccatcgtccccggcggtcgttatcataattttaaagactttattaatttccccaatgtcggcaaagccaatctggtgaacaaaccactgccgcgtttacgccatatttggtttgataaagcccagttccgcaatggttttgatgccattcgcgaacgcgatgtgttgctctattatccttatcacacctttgagcatgtgctggaactgctgcgtcaggcctcgttcgatccgagcgtgctggcgattaaaatcaacatttaccgtgtggcaaaagattcacgcatcatcgactcgatgatccacgccgcacacaacggtaagaaagtcaccgtggtggttgagctacaggcacgttttgacgaagaagccaacattcactgggcgaagcgcctgaccgaagcaggcgtgcacgttatcttctctgcgccggggctgaaaattcacgccaaactgtttctgatttcacgtaaagaaaacggtgaagtggtgcgttatgcacacatcgggaccgggaactttaacgaaaaaaccgcgcgtctttatactgactattcgttgctgaccgccgatgcnngcatcaccaacgaagtacggcgggtatttaactttattgaaaacccataccgtccggtgacatttgattatttaatggtgtcgccgcaaaactcccgccgcctgttgtatgaaatggtggaccgcgagatcgccaacgcgcagcaagggctgcccagtggtatcaccctgaagctaaataaccttgtcgataaaggcctggttgatcgtctgtatgcggcctccagctccggcgtaccggttaatctgctggttcgcggaatgtgttcgctgatccccaatctggaaggcattagcgacaacattcgtgccatcagtattgttgaccgttaccttgaacatgaccgggtttatatttttgaaaatggcggcgataaaaaggtctacctttcttccgccgactggatgacgcgcaatattgattatcgtattgaagtggcgacgccgctgctcgatccgcgcctgaagcagcgggtgctggacatcatcgacatattgttcagcgatacggtcaaagcacgttatatcgataaagaactcagtaatcgctacgttccccgcggcnatcgccgcaaagtacgggcgcagttggcgatttatgactacatcaaatcactcgaacaacctgaataaccctatgccaatacacgataaatcccctcgtccgcaggagtttgctgcggtcgatcttggttcaaacagttttcacatggtcatagcccgtgtggtagatggtgccatgcagattattggccgcctgaaacagcgggtgcatctggcggacggcctggggccagataatatgttgagtgaagaggcaatgacgcgcggtttgaactgtctgtcgctgtttgccgaacggctacaagggttttctcctgccagcgtctgtatagttggtacccatacgctgcgtcaggcgctgaacgccactgactttctgaaacgtgcggaaaaggtcattccctacccgattgaaattatttccggtaatgaagaagcccgtctgatttttatgggcgtggaacatacccaaccggaaaaaggtcgcaaactggttattgatattggnggcggttctacagaactggtgattggtgaaaatttcgaaccgattctcgttgaaagccgccggatggggtgtgtcagctttgcccagctttatttccctggcggggtcatcaataaagagaattttcagcgcgctcgcatggcggcagcacaaaaactggaaactttaacctggcaatttcgtattcagggctggaacgtggcaatgggcgcttccggtaccataaaagccgcccatgaagtgttaatggaaatgggcgagaaagacgggataattaccccggaacgtctggaaaaactggtaaaagaagttttacggcaccgtaatttcgcatcgctgagtttaccaggtctttccgaagagcggaaaacagtcttcgttcctggactagcgattttatgcggtgtgtttgatgctttagccatccgtgaactgcgcctttctgacggggcgttacgcgaaggcgtactgtatgaaatggaaggacgtttccgtcatcaggatgtgcgtagtcgcaccgccagcagcctcgccaaccagtatcacatcgacagcgaacaggcccgacgggtgctggataccactatgcaaatgtacgaacagtggcgggaacagcaaccgaagctggcgcatccgcaactggaggcgctactgcgatgggccgccatgctgcatgaggtcgggttgaatatcaaccacagcggtttgcatcgtcactccgcttatattctacaaaacagcgacttgccgggttttaatcaggaacagcagctgatgatggcgacactggtgcgctatcaccgtaaagcgattaaactcgacgatctgccgcgctttaccttgtttaagaagaaacagttcctgccactgattcagctattgcgccttggcgtattactcaacaatcagcgtcaggcaaccaccacaccgccaacattgacgctgattactgatgacagtcactggacactgcgtttcccgcatgactggtttagtcagaatgcgctggtactgcttgatctggaaaaggagcaagaatactgggaaggcgtggctggctggcggttgaaaattgaagaagaaagtacacctgaaatcgcagcttaatgctttgcgggccgacgagaaatgtcggcccgcattattcaggcactttcgcgaatgggttcgatttcattcagcgtatcaattaacggttgcggcttaccaataagataaccctgcatataatcgatccccaaagagagcaccgcctcgcggatctcttcgttttcaacgtactctgccactacccgcattttcttcattcgcgccaggtggcaaatcgatgccactatctgataatccagactatttgacacaatattgcggataaaactgccgtcaattttaagcagatcggcattcacatttttaagccgcgcatagctggcgtagccggtgccgaaatcatcaatcgcaatctggcagcctaattcctgaagatgctgcaaggtgatttgcgcctgcttaacattggtcagagcattactttcggtgacttcaaaaataagttgccacgcttcaatctgatatttatccagcaactgactgacttcaacaggaaaacgagcctgacataccgaggttggagacagattaatagcaaaacggtgagcgggcatcttcgctctgttttcagccataaattgcagcgtatgctcaatgacccacatgtcgatactcgacgataaaccaaattcgtgcgcgaccggcaagaagctatcggggccgattagttcatcattctcacctttcatgcgcagaagaatttcatggtaaacatcaccacgcataccggtaatcggctgggccatcaggaaaaaatggttgtgttccagcgcctgctgtagtcgattcatcatcgcgactttatctttcaattcgcgttgcaaatacattgccccgcgacgctgcatattttccggggcgttggtcacgatggaaagttcggcgaccgtatttagctctcccagcagcaggtagatatgattcactggcgagcgcacatagcagtaactgacgccaatctgcggttgcatcggcatgccatcccaaaagaaacgaaattgcttgagatggctatccagtgcggtaatgcgctcctggtgcgattctgtattcagtcgcagcgcgagatcgttacccgaaagctgataaacatcttcacctggttccagcaagggtgacagccagtgagaaagtttttgcttgtattgaatccgcagcatgatgccatagtttttaaccagcatttccatgccagggatgcgtaaataacaaagcgcagaccagggggcatcacgcaacgcgcgattcagggcgcgaacatttggcagatgaaccaccgggtccacatacgcaaggcgctgaatgcgtctgactaccgttctctgacgggttgccagtacagccatataattgacaataaaagagaataccagataactggaggaggttatggtcagctgcgtggtatagccaggataaatgggaatgtaattttgatagctgtggatgctgatcatcaacacgaccgcccagagcagcgaaatcagcttataaccatagcgcatcgctccccacatcatcaggggcagcaataatgacaaggtataattggtgctaaaaattgtgcttttttcatttaacggcatgcataacagcaacagtaaagcacctaatgccagcagccagagtgcgaactcttttttggtgactttgacatcaacctgctgttttaattgcgaataataactacgtaaataaaacggatttcgcactacccgaatgatgaagtagcacagcgggacaccaatcagattgcccaccagtaaggcctgataattgattaaggtcccgagattaaaaggcatgacgccaaccagattttctctgctcgccagtaatcctacaaatgcagcaaactggaaaagtatcagaaacagcgttgcaggaaacacaatctgccagaatatacgctgggaaattaaacgggtatcaccatgtgaaacgttgttacgccggggagtaaagaccctgtaaccgccccaacagagaatgataatgataataaaattagccgttaatgagagcgtttcgtaaaaacccagctctgcatatttgcggacaaaaatccctaaggcgatccctggcaatgccgcccagctgaaaaacatcatcatgctgatcatcagtgccagaggcagataaaagagaaaaacctcaccggaagaaatatgcgcgaaagtattaatgtgggcgaaaatgggcaagattaaagaaggcaggaacagcggaagcccccaccatttatcacgtatttttatataagttgcattcagtttcatagatgctcagcagaatcccccacatcctgaaggaggtgtattcagacaggcatcccacctgacttcgaatgatgattattcatcactatagagagcattgattctaagtgtcatatgaaagttccaattgatatatatcaaacaaaataaccctgattaatgaattattacgtttatcatgttaattcatcattattacatcatcattgtaaataattaaattaacttccataacattaaaatatgtatccactgacgattttttacataacgaagaattgaccattttgtcctgttgtgccttaatgtaagtaccgtccacggcgtgggacatacttcaaggaaccttttgtgagtcaggcaaccagtatgcgaaaacgacaccgatttaacagtcgcatgacccgtatcgtactgctcatcagctttatcttcttctttggccgttttatctactcgtccgtcggtgcctggcagcaccatcagagcaaaaaagaagctcagcaatccacactctccgtcgaatcaccggtacaacgttagcggttaccttctccactttcacagaacataacggcgcttcgctgtcggatgcttttgctctttggaattatcaaagcggcagatattctttcatcttaaattatacgtctttgtcccgactgatgtttatcctgtttggctgcgaaataaatataaaattaatatatatgttgtaatgatgtatttttataaattattcccnnnnnnnnnnntaatanntttaatccatccctttatacgcaatacatttactttcctcttttgatgatcttaaatgtcttatttttcgtaatgtgtataacaaggaatagtgatgaaatttaaaaaatgtcttctgcctgtggcaatgttagcgtcattcactctggcaggatgccagtcaaatgctgacgatcatgccgccgatgtttatcaaaccgatcaactgaataccaaacaagaaactaaaaccgttaatattatttccattcttcccgcaaaagttgccgtagacaactcccaaaataaacggaacgcacaagccttcggcgcgcttattggcgcagtcgctggcggtgttatcggccacaacgtcgggtctggcagcaattccggaacgacggcaggtgcagttggctgcggagctgtaggcgcggcagcgggttctatggtgaatgataaaaccttagtggaaggtgtttctttaacgtataaggaaggcaccaaagtgtatacctctactcaggtgggtaaagagtgccagtttacgacaggtttagccgttgttattaccacgacgtataacgaaacgcgtattcagccaaataccaaatgtcctgaaaagagctaataatcaggaggagtcatgaagaaagtttttctttgcgccatcttagcctccttaagctatccggctatcgcctcatcattgcaggatcaactctctgctgtcgcagaagcggaacagcaaggtaaaaatgaagagcaaaggcagcatgacgaatgggtcgcggagcgcaacagggaaatccagcaagagaagcaacgtcgcgcaaatgcccaggctgccgctaacaaaagagcggcaacggcagcggcaaataagaaagctcgtcaggataaactggacgccgaagccactgcggacaaaaaacgcgatcaaagttatgaagatgagctacgcagcttagagattcagaaacaaaaactggcgctggcaaaagaagaagcccgcgttaagcgagaaaacgaatttatcgatcaggagctgaagcacaaagccgcgcaaactgatgtcgtgcaatctgaagctgacgccaacagaaatatgactgaaggcggtcgcgatctgatgaaaagcgtgggcaaagcagaagagaataaatcggacagctggtttaattaatcgatgttagtaacttcaagcctataattcttgaagataaaaaaccctctgtagtaacagagggttttgttcattcatagtgcagggtcaaatcattcccactcaatggtagctggtggcttgccgctgatgtcatacaccacgcgggaaataccgttcacttcattgataatgcggttggaaacgcgaccgaggaaatcgtacggcagatgcgcccagtgtgcggtcataaagtcgatggtttcgacagcacgcagagagacaacccagtcatacttacgaccatcgcccattacgccaacggaacgtactggcaggaagacggtgaacgcctggctgactttgtcgtacaggtccgctttacgcagttcttcaatgaagatggcgtcagcacggcgcagcaggtcacagtactctttcttcacttcacccagaacacgaacgccaaggcctggtcccgggaacgggtgacggtacagcatgtcgtacggcaggcccagctccagaccaatcttacgcacttcgtctttgaacagctctttcagcggttcaaccaggcccatcttcatctctttcggcaggccgcccacgttgtggtgagatttgatgacgtgtgctttaccggttgcagacgccgcagattcgataacgtcagggtagatggtgccctgcgccagccacttcacgtnttccagtttcagcgcttcttcatcgaatacttcaacgaaaacgcgaccgatgattttacgttttgcttccggatcgttttcgccagccagcgctgacaggaagcgatcttctgccggtacgtgaacaatgttaagaccaaagtgatcgccaaacatatccagaacctgctctgcttcgttgagacgcagcaggccgttgtcgacgaatacgcaagtcaggtttttaccgatagcgcggtgcagcagcattgcggttacggaggaatccacaccaccagagaggccgaggatgactttatcgtcgcctacctgctcgcggatgcgagctacagcatcgtcgataattttcgctggcgtccacagggcttcacactggcagatatcacgcacaaaacgctccagcatgcgcataccctggcgggtgtgagtcacttccgggtggaactgtacgccatagaagcgtttttcttcgttagccataatggcaaacgggcagctttcggtgctggctacggtgacnaagtcggacgggatagcggtaactttatcgccgtggctcatccagacatcgagcagcggtttaccgtctgcggtcagcnnnnnntcgataccgcgaaccagtgcgctgtcgtttacgacttcaacctgcgcgtagccaaattcacgttcgttagaggcttcaacgtgaccgcccaactgcattgccatggtctgcatgccatancaaacgccnaataccggtacgcctgcttcaaagacatactgcggcgcacgcgggctgttttcttcagtagtactttccgggccgccggaaagaataatgccgcttggattgaagtcacgaatttgtgcttctgtcacatcccatgcccacagttcgcagtaaacacccagctcacgcacgcggcgcgcaaccagttgagtgtactgagaaccgaagtccagaatgaggatgcgatgcttatgaatgttttccgtcattgacgcttattccgaggcaagtgaaacagataatataaatcgcccgacatgaagtcgggcgaagagaatcaggagcccagacggtagttcggggactctttagtaatggtcacgtcgtgaacgtggctttcctgaatgcccgcaccgctgatacgtacaaactccgctttagtacgcagttcgtcgatagtaccacagccggtcaaacccatacaggagcgcaggccgcccatctgctggtgaatgatctctttcaggcgacctttataagctacgcgaccttcgataccttccggcaccagtttgtcggcagcgttatcgctctggaaataacggtcagaggaacctttggacatcgcgcccagggaacccataccacggtaagatttgtaagaacggccctggtagagttcgatttcacccggagattcttcagtacccgccagcatggaacctaccatcaccgcgcttgcgccagcggcgatagctttggcgatgtcgccggagaagcgaataccaccatctgcgataaccggaataccggtgccttccagggcttcaactgcgtcagcaacggcagtgatctgcggaacacctacgccagtaacgatacgagtcgtacagatagaaccagggccgataccgactttaaccgcgctgcaaccagcttctgccagagcgcgtgcacctgcagctgttgccacgttgccgccgatgatttgcagatccggatatttagcacgggtttcacggatacgctgcaaaacgccttctgagtgaccgtgggaggagtcgatcagcagaacgtcaacgccagcggcaaccagcgcgtcaacacgctcttcgttacccgcacctgcgccaactgcagcaccaacacgcagacggccttgctcgtctttacaggcgttcggtttacgttccgctttctggaaatctttcacggtgatcatgccgatcaggtggaattcgtcatcaaccaccagcgctttttcaacgcgtttttcgtgcatttttgccagcaccacttcacgggcttcaccttcacgcacggtgaccagacgctctttcggcgtcatgtaaacgctaaccggctggttcaggtcggtaacaaaacgcacgtcacgaccggtgataatccccaccagttcgttttcttcggtaacgaccggatagcccgcaaaaccgttacgctcggtcagttctttcacttcgcgcagcgtcgtggttggcagaacagtctgcggatcagtcaccacaccagattcgtgttttttcacacggcgaacttcttctgcctggcgttcaatggacatgtttttgtggataaaaccgataccgccttcctgagccagagcaatagccaggcgcgcttccgttacggtatccattgctgcggaaagcatagggatattcagacgaatagttttcgtcagctgggtgctgaggtcagcagtattcggcagaacggtagaatgagcaggaacgaggagaacgtcgtcaaacgtcagagcttctttagcgatacgtagcatgggcaatatctcgaccagagtggttaataaatattgccnnggcattatacagagcgtaaccgattgcatctacccctttttgcaaaaaatgcttgctatccccgaagggcgggttactatcgactgaataacctgctgatttanaatttgatctcgctcacatgttaccttctcaatcccctgcaatttttaccgttagtcgcctgaatcaaacggttcgtctgctgcttgagcatgagatgggacaggtttggatcagcggcgaaatctctaatttcacacaaccggcttccggtcactggtactttacactcaaagacgacaccgcccaggtacgctgcgcgatgttccgcaacagcaaccgccgggtgaccttccgcccacagcatgggcaacaagttttagttcgcgccaatattacgctctacnagccgcgcggcgactaccanataatcgttgagagtatgcagccggccggtgaagggctgctgcaacanaagtacgaacagctcaaagcgaagttgcaggctgaaggattgttcgatctgcaatacaaaaaaccacttccctcccctgcgcattgcgttggtgtgatcacctcaaaaaccggtgctgcgctacatgatattttgcatgtgttaaaacgtcgcgatccttctctgccggtgatcatctaccccaccgccgttcagggcgatgacgcgccggggcaaattgttcgcgccattgaactggcgaatcagtgcaatgagtgcgacgtgttgatcgttgggcgcggcggcggttcgctggaagatttatggagttttaacgacgaacgcgtagcgcgggcgatttttgccagccgcattccggtcgtcagcgccgtcgggcatgagacggatgtgaccattgccgattttgttgccgatctgcgtgcaccaacaccgtcggctgccgccgaagtggtgagccgtaatcagcaagagttactgcgccaggtgcaatcgacccgtcaacggctggagatggcgatggattattatctcgccaaccgcacacgtcgctttacgcaaattcatcaccgattacagcaacagcatccgcagctccggctggcacgccagcaaaccatgcttgaacgcctgcaaaaacggatgagctttgcgctggaaaatcaacttaagcgtgccgggcaacagcagcagcgattaacacagcggctgaatcagcaaaatccacagccgaagattcatcgcgcgcaaacgcgcattcagcaactggaatatcgtttagcagaaaccctgcgcgcacagcttagcgccacgcgtgaacgtttcggtaatgcagtaacgcacctcgaagccgtaagcccactgtcaacgctggcgcgtggatacagcgttactactgctactgacggcaaggtactgaaaaaagtgaagcaggttaaagcgggtgaaatgctaaccacacgtctggaagacggctgggtagaaagtgaagtaaaaaacatccagccggtaaaaaaatcgcgtaaaaaagtgcattaagccagcacgaattcaacgcnttttttcgatatcaagccatgcccgtgctgacagaagtaatctaccgcaccgcaggcttttaacacctgcaacggttgatggcagtccgggcaaagagctttcatttcaataactttcccgcangatgggcaatacgcatggccgttatcctgatcaagcacatgctgacattgtggacaatgcagttccatatgaattcctccggtagccacccctctacattcatagagggaatggcagataaaatacttacggataattatttatttttcttgatgtgcttcatcagacgcttacgtttacgcatctgggttggcgtcagggtgttacgcttgttcgcatacgggttttccccttctttgaactgaatacgaatcggcgatcccattacgtccagcgatttgcggaagtagttcatcaagtaacgcttgtaggaatcaggcaggtctttcacctgattaccgtgaatcaccacaatcggcggattataaccaccggcgtgtgcatatttcagcttcacacgacgaccgcgtaccagcggcggttggtgatcttcaacagccatcgtcatgatgcgcgtcagcatagaggtccccacacgacgggtggagctgtcatacgcttcacgtactgattcaaacaagttaccaacaccactgccgtgcaaggcagagataaagtgcacacgagcaaaatcgataaagcccagacggaagtccagcgtttctttcacctgctctttcacttcctgtctcaggccatcccacttattcaccacaatgacaagtgagcgcccactattgagaataaagcccagcagcgagagatcctgatcggaaataccttcgcgcgcatcaatcactaacatcaccacgttggcgtcttcaatggcctgcaacgttttgattacggagaatttctctacagcatcggtgattttgccgcgtttacgtacgccagcggtgtcaatgagcacatactcacgtccatcgcgttccattggaatgtagatactgtcacgcgtcgtaccaggcatgtcataaacaacaacgcgctcttcaccaagaatacggttagtgagtgtagacttacctacgttcggacgacccacaatcgccagtttgatcggcagactttgcgggtcgaagtcgtcttcctcttcttcttcgccgttctcttccgcttcaaattgcgcccagtattcagcgtcttcgtcgacttcctcttgcggtgcgagatcttccatccacggcagtagcacatgctccagcagacttaatacgccacgaccgtgagacgcggcgatcgggtagatttcacctaaaccaagcgagtagaaatcaaccactgcctgatcgggatccagaccgtcagttttgtttgccaccaggaaggtcggtttttcacgggagcgcagatgtttggcaatcgcttcatctgccggcatcaggcccgcgcgcgcatccaccataaacagtacgacgtccgcttcttcaatcgccagcagcgactgttccgccatgcgggtttctacaccgtcttctgtgccatcaatcccgccggtatcaatacagataaactcacggccttcaatttccgcacgaccgtacttacggtcacgagtcagacccgggaaatccgcaaccagcgcatctcgggtgcgagttagacggttaaataacgtggattttcctacgttagggcgcccgacaagcgcgaccacaggtaccatgtttaaagcctcatttttataaatcatcagacaacgcacgctatattcgcgtcgttgttaaaaacaggaaaacggcccctgtccaggagccgttttcaaagtgaacgacagagacgattaacgtgtaatagagtacacggttccgtcttttgcctggatcagcagtttgccgtcagcggcaaccggttcagtctggaaaccggaactatcaactttttgctgggcaacgaaacgaccatcttcgacgttaatccagtgcaaataaccttcactgtcaccgaccaccaggttgccattatacagcaccggagaagtcagcaggcgatgcagcagatcgctttgtgtccacagcgtaacgccgccatcaatggtcaacgccatcacccggtcattttgatcgaccagatagatgcgattgccgtcgacgatgaaatcattcaccgaacccagttcgcgtttccacataatctgaccactgcgcagatcaagcgccgtcaggttaccattataggccagcgcgaaaacaacgccgttaacaacgacgggagtcgtgtcaacatcgctcagacggtcaatttcggtagaaccggtcgcttgggaaatacgctgctgccaaatcatctggccctgttccatcagcactgcgctgacgcgaccattatcgccccccacgacggccgcaccaaaagccgttgccggcgcagactcgccacgcaaagagagcgaaggcatatcgaggttaactgtccatttgacagcgccgtcagcttcgttcagcgcttgtaactgaccgttactggtgtggattaacaccagaccgtcgctgaccaccgggcgcgaaagtgcttcacccgcgactttagtttgccatgccacagtaccatcgctggtattcagcgcgtaaacctgcgccttttcgctgccaatgtagacatgtccaccagacacggtcacaccgccagaaagtaatgcaggctctttagagaaccagccatctttctcggccaggctgacagaccagatttctttgccatcatccgcattcagcgcttttactaaaccagcgcggtccgctgcatagacaacgttgtccgccagtgccggatgaagattggaatagaagttgccaatgccgctaccaacggaagtgctccacgccgtggtcggcgtaaactggttttcaacggttggcaatggggacatctttaccacatcttcttcgctgttaaacagcgaacagccgcttaaaagggtaacggaaagcagtcctggcagcagtaatttacgcaattgcatcgggtccctctcagatggacaaattattaattttcatctgcatcatttcgctcagtgccggagtaacatcgcttttcacgcctgcttcccatgcactacgcgcaccttgcttatcacctttgctcagcaatgcttcaccacgcaggtcggcaacaatggcagcccacccttcacctttgatggtatcaagggttttcagcgcggcatcagcctgcttgagctgtacctgaacgcgagcaagacgcagatttatcacggctttgagattttcatcgctcgtgtctgccagcccctgttgtaactgggcggcagctttctctagttcatttttgtcaacaaattgctgcgcaagttccaaagaagccagcgcaccataagtatttttattttcagcagcaaatttttccgccgccgggatgctatccggtttgccttcgctcactgcggtaaccgcattttgataggcaagagaagcggagcgtgcanaatcaacctgatggctgttccagtagcgccagccaatcagtgcgccaacgcccaaaatcaccccaacagccagtgctttgccattttcagcaaaaaagcgtttaaccgcttctacctggtcgttttcgttctcgtaaatttccacgctgtccttctccttccttaacccagtaacgtgcgcaaatgcgcggctacgctatcctgcgcaactgccgtttgctcaccagagcgcaaatccttcactactgctgtgccgttagccacttcagactcacccagcaccacagcaacgcgggcaccccatttatcagcacgggcaaactgtttcttaaagttgccgccgccgtggttggtcatcaatttcacgcccggtaattcatcacgcagacgctcagctaatgccatagccgcagattgtgtatcagcacctgaagccaccaggtatatatcgacaacaggatcggctttaaattccggattaacggcctgtactaacaatacaagacgttcgaggcccatcgcaaaaccgacagccggtgttgcacggccgcccagttgttccacaagaccgtcataacgaccgcctgcacacacggtgccctgggagccgagactgttagtcacccactcgaaaacggtacggttgtagtaatccagaccacgcaccagacgctggtttacggtgtaagcgatccccgcgctctcaagcagtttgcacagaccggcaaaatgctcacgagattcctcgtccagataatcacctaatgccggagcgtcgttgagaagcgcctgcacttccggattttttgaatccagcacgcgcagcgggttagtgtacatgcggcgtttgcagtcttcgtccagcttttctttatgctgctcaaggaatgccaccagcgcatcgcggtaattggcgcgtgcttccagcgaaccgatagaattcagctcaagagttacgtgttcggaaatacccagcgcgcgccaccagcgggcggtgagcataatcagttcagcgtcgatatccggaccttgcagaccgaaaacttcgcagcccaactgatggaactgacgataacgccctttctgcggacgctcgtgacggaacatcggcccgatataccacagacgctgttcctgattgtacagaagaccatgctcgatgccggcgcgtacacagcccgccgtcccttcagggcgcagagtcaggctgtcgccattgcgatcctcaaaggtgtacatctctttttcaaccacgtcggtgacttcaccaatcgcacgtttgaatagcggggtctgctctacaatcggcaagcggatttcactgtaaccgtagctgccgagcacgtttttcagtgtgccttcaatgcgctgccagatggccgtttcgccaggcaggtaatcgttcatgccgcgaatggcttgaatgttttttgccacgtttattctctttctgaatataaaaatgaaccctcaacgcttccctcaatgtttcgggagccatgcgggttcaatcatacacgggaagcgaggcgcttcccatcacgttattatttttcaacctgctgaacgtcaattcgacgcgcttcgtccagctgactggctttcgcacgaatgcgtgcctccagctggtcgatcatatcgttgttgtccagacggtctttgcgcacgccatcttcatagagaccgcttttcttgttgccgccggtgacgccgagtgtagaaaccagcgcctcacccgggccattcaccacgcagccgataatcgaaacgtccatcggagtgatgatatcttccaggcgttgctccagcgcgttaactgtaccgataacatcaaattcctgacgcgaacaggtcggacaggcgatgaagttgatacctcgcgaacggatacgaagcgatttcaaaatatcgaaaccgactttgatctcttcgaccggatcggccgccagtgatacgcgcagcgtgtcgccgatgccttcagacagcagcagacctaaaccaatggcggattttactnnnccgntgcgcgcgccacccgcttcggtgatccccagatgcagcggctgatcgatttgttttgccagcaaacgataagactcaacagcgaggaagacgtcagacgctttcacgctgactttgaactgatcgaagttcaggcgatcgagatgatcaacatggcgcatggcggattccagcaacgcctgcggcgtcggttcgccatacttttcttgcagatctttttccagcgatccggcgttaacgccaatacggatcggaatgtttttatcgcgcgcacagtcaaccaccatgcgaatacgctcttcattaccgatattgccagggttaatacgcagacaatcgacgccgtattccgctactttcagcgcaatgcgatagtcgaagtggatgtcagccaccagcggcacgttaacctgctgttggatgagtttgaacgcttctgccgcgtccatcgtcggtacggagacacggacgatatcagcgccaacgcgttccagcgccttgatttgattgaccgttgcttcgacatctgtcgtacgcgtattggtcatggactgtacggcgatgggagcaccatcgccaatcggcacattcccaacgtaaatacgtgttgattttctacgttgaattggagcctggttatgcatgaaaaatctcccgcgttacccgtctgttactgcgccggtgattgttcggcattgagggtcagacgcgcaacctggttagttctgataaaacgactcagatcgacaggtttcccttgatactggatctgtactgcggctggcgcaccaattttcagtttgtacggtgcctggccggttaagttcaaattaccgtctttacgctgcataccgctaaacaattttttaccggtagcatcagtgacctccagccagcaatcggcagtaaagttcatcaccagcgcattcggatcagccaccggcgtggtcacgccagcctgatcggttggcaacggcgcagcaccatctggcgttgttgctgccgttggtgccggggtcgcggcggtatcaacatttgcctgcgaaggcgaaacaaccgcattctgttgcggatcaacagctggtgctggcgcagttacgacaggtgtttgcgtgttggttgcggtagtatccacagacgctggcggcgtggacgttgtagccgggtctgtagttgtcnacgtatttaacggaacactctgcccctgctcgctattactgctcagttccnccgaagattgatcggccatagtggtgatctcttcctgctgagctttgtggtcttgccaccaccaggcaccgctcaggccgataaccacaaacaacaccagccaggtgaaggtcatcagccagccgtcgcgttttttgcggcgtttaccgagggaaaaactctgcatcggcgcaacttttgcagcccgtagtggagcctgcttttccagccctggcagcagttcttcttctggaatatgtaccagacgcgcataagagcggatatatccgcgcaggaatgttgaagcaagatcggcgggtgccttatcttcttcaatgtcgcgtaccgtggaaaccttcaggcaaagtcgctcggcaacggcctgctgactaagtcctagttgttcgcgagcattacgcaggcgagcgccggtagtaagtgcttcattttggtcgtgcgtggcttcagtattcattcgctgcaggtacgtttaaatgagaattgagatgccggtgaaccatcatgctcacccacaccgcgaaacatccgttaagttaaccgttatcatacagtataagaccgtctgtgtgctcgtgacaaagcccacattcactaaggctaacttactgttgcatcgttacatactgccttaaagtcagcaaaaacgcaccgttaatattgaccagacaattgcaacttaatacttcattcataaaacattacgccacggtacataaagtaaccgtggcgtaatggctatcagaccgctttaatgtcgatggcttcaccctgcatccgtttacgcagggtacgtttcgtacggtcgataacatcgcccgccaactgaccacaggcagcatcgatatcatcaccacgcgttttacgcacaatagtggtgaaaccgtagctcatcagcacttttgagaaacggtcgatacggctgttcgagctgcgtccatacggcgcagccgggaacgggttccacgggatcaggttgatcttacacggcgtatctttcagcagttccgccagttggtgcgcgtgttcagtgccgtcgttaacgtggtcaagcatcacgtattcaatagtgactcggccctgattggcgttggatttctccagataacggcgcaccgcagcaaggaacgtttcganattgtncnttttgttgatcggcacaatttcgtcacgaatttcgtcgttcggcgcgtgcagggaaattgccagcgcaacatcgatcatatcgcccagtttatccagcgctggaactacaccggaagtggaaagcgtcacgcgacgtttagacagaccaaaaccgaaatcatcaagcatgatttccatcgccggaacgacgttgttcaggttgagcagcggctcgcccatgcccatcatcactacgttagtgattgggcgctgaccggtgacttttgctgcgccgacgattttcgccgcacgccacacctggccaataatttccgatacccgcaggttgcggttaaagccctgctgggcggtggaacagaatttacactccagcgcacaccccacctgcgaagagacgcagagcgtagcgcggtcgtcttccgggatgtacaccgtttcgacacgctggtcacccacggcaatcgcccatttaatggtgccgtcagatgaacgctgttcttcaaccacttccggtgcgcggatctccgccacctctttcagtttgccgcgcaacactttgttgatgtcggtcatctcatcaaaattgtcgcagcaatagtgatacatccacttcatcacctgatcggcgcggaagggtttttcacctaaatctttaaaaaactcccgcatctgctgacgattgagatccagcaggttgatttttccatctttggtggtgacgttttcaggtgtgactaattgttcagacatatgctattccggcctcgttattacacgttatggcccctggagggttgaaaaaagaaacgccccggtgagcggctgctcgtccgggggcgctgcattgtacaaattctggcgcacggatgccacgtttgcacgcggcatttacgaaattattaacgggtgcgcgggcacacttcgccttcgccgaagaaataagcgatttcgcgagcggcagattcgacggaatcagaaccgtgggtaccgttttcggtcaggctgtcagcgtaatcagcgcgcagagtaccggccagtgcgtttgccggattggtcgcgcccagcagatcgcggtgacgctgaacggcgttttcaccttccagcacggaaaccacgatcgggccagaggtcatgaattcaaccagaccatcaaagaacggttttccatcgtgttcagcataaaagccacgtgcctgttcaacggtcaggtgcagcattttggtgccgacaattttgaaccctgcagcttcaaagcgcgcaaagatattaccaatgacgttttttgctaccgcgttcggtttgataatggaaaaagtacgttcaatagccatttttacctctgtaaattgttctgttgttgtctgtaccagcgtacgagatggcgcggattataatgagcaacagagccgttgactattgatgaaggtaacatttttttaaaanaaaatgagttttagcaacaactcgacttttatggtgttctcatcccataacgatgacgttggcaataaagacaattttgcgcattttgctgaaaagtaagaaaggatttttgacaggttttacagactttgcgattagcatgaagattcacaatttttgccggtagaatcgtcaattcaacggtcattgcctgatgaaaacaaacagcaatacaattttggcatccgttacacaaggcatcatttatttgtaaatggccttcgttaagcgaaaagacctgttgctcgcaggcccgccagcatgcaccgcaaagctgacacttttgaggatccatcatcgggcgagcatcactaatctggggccataaataatgtaaccgacgtaatcctagttgtatttgtgtcatctgaacatccgcacgctgcacatggaacaaacgacgccgggaaacattcacctcactggtatgtggagataccacagaccagccttcctcgccatattgccgtaagcgttcgtttaacagcaataatgcgcgctcccatgccttcgcctgactcagatcaatcgcgatcgctgtgatcccctgctctttatgccatagcaaaagttcttccagcgtcggcgcaatagtggtgaaaggtgcgaccagggtgtgattgcgaaaataacgtaaaggggaattaacgccacgaatagcctcttgcggacaaataaactggcaaaccgcacactcaatacattgttccgcgtcgaccgctatgccctcttctgtcagcgttagcgcctgtgccgggcaagcctcgacacaggcatgacatgttgcaaaacgaaagcgttggcgcgcgcattccgcgccaatcgttatgttatgacttaacattagccgatactaaaaaagacaaaacgcagcataacttcactccccactagcattacgctaccgaataacgccgccgggatattctttttacaaccaccgacagcaaagaacatcatcccaatgacggaaattccccagcttagtgtcagtatgggttttaactgtcccagcatcgctaatggcgcatgtggcaatgtggctatctgcatcgcatttgccgttaaatcccctatccacaacggctgaaccaacaaacgcagcagaaccaggagagcgatcaccaacacgcatccattacgcagggcatcaatctgcggcaaaattccgctaatacgaaacactgctaccagcgctgaaccgagaattcccactgtacctaagaacataatcagcgtgttgtaatgctgccaggtgataatcgacgtatggatgtaaacttgcgccatgcagaaaacatcaacaatcccgaccactgccgctagcataagcaggagttgccagccgcctttgcgtaacatgaccagtaatgtggataaacccaatagcgccagatacagcgcaccaaagataatttcccgactcagccatgaactggaaaagtggctcagcgcatgcatcgcattaagtggataacccaagtgtaaggtagaaatcagtaaccctacggcacctgccaaaaaagccaacagtaatggcggccgcataaccgggcgggcgctggaggtgattaaaatatgacgatgaagaaacgccagccacaacgtcataccgaccgatgcctgtaacaacagcgtaaaagccattaacggtaattcatgcatgatgtgacgcctccttttccgcgccctgatgcggtttaatcaccagatttggctgcgtaatcgacgaatcaggtaaacctttcacatcactgacatcgccatacttttcacgcaactcatcaatagggccgaacttaatcgcccccaacgggcacgttgccacgcaaatgggttgttctcctttagcttgcagatcaatacagaaatcgcatttcgacatntgcccggtctgctcattcatttgtggtgcgccgtaaggacaggaccaggcgcagtaaccgcaaccgacgcacttatcagtattcacgcgcacaataccgtctccgggacgcttatgcatcgccatcgtcgggcaatttttggtacagatcggatccgcgcaatggttacaggaaacagaaagggtataagcaaagacattatgactcacaccgccctctccagtggcgatgaagccacctccgttcacttcatacacgcggcgaaaacgtcgcccaacctcaaggttgtttttgtctttacaggccacctgacacgctttacagcccgaacaacgcgaagagtcaataaagaaccctaattgtttgtcgctgacagatgcaaattctttaaattggctcatgctttctcaacctccaccagcattgtttgatgcgaattccctttcgccagcgccgtaatgcgggtcgaactcagtacattggcacagcctccgcgatcgataccttgtgcatccggttgccaccatgcccccgcctgcatagcaactacgccagggatgatacggggggttatttccaccgggataatgctcacaccacgatcgttataaatttttacgctatctccttcgctaatcccgctctgttttgcatcttgcggattcagccagagtttttgcgtctgaacttcttgcagccacgggttagcatactgggtggaattagcacggtttttccctttccaggtgatgagctgcaacgggtatttcgccgtcagtttatcttctggcccttcaaaggcagggacatagtgcgaaagcgcgggaatttctggatcttgcatatcaaaaagacgcttagagaagatctcaattttgccggaaggcgtcgggaaaggattattctgcggatcgcgaatatttgcttcgaaagcgatgtgcggcgcgcttttgaaaagatgtcgacgtgttttttgcagggttgcgaagtccggcaaattttcatccggcatcgccagacgagtttgctcccagatatgctcgatccattgcttctcatcacgtccttgactgaactcggcttcgacacccagttttttcgccacgtcacgcaaccagtcataatcggtgcgacgttcaaaatccggctcaatcagtttttctgacagaataagatagctcgcagttccccatgtttcgccgatattccagcgttccataaagctggtttccggcagcaacacatcggcatatttcgcgctcggagtcatgaacagatcgctgagtacgatgaattctattttagattcgtcttcaaggagcttcgcggcctggtggacgtccgggttctggttcgccagataattacctgccagtgagaacagcaggcggatattactgtcgagtttatcgacacctttaagcccatcttgcggcgtaactttagaagcatcatccgccgcctgcatccagttcataatcgagattttcgcttgtaccggattttctggcatatctggtccaacgcagaatttacgattagaactaccgccgtaacctgccgcccagccacctttgatgccgacgttaccggtaatcgaggccagtaaagttgaacctcgggcggtgcgttcgccgcaaatatgtcgctgtggcccccatccctgaatcaacgctgcgggttttgtagtggcgtaatcgcgtgccagttgacgaatggattgtgctggaacgtgggtaattttttctgcccattccggcgttttgtgtatcccatcttttgcgccaaaaaggtaggcaaccaacgattcgttggctggtacgccttccggcatggagttttcatcaaaaccgagagtatatgtgtcgataaatgtcttatcgtggagattctcgctgataatgacgtacatcatcgcgtccatcaacgcattgtccgtggtcggcaacagngggatccactgatcggcaagtgaagatacggtgtcggaatagcgcggatccaccacgataaaacgtgtaccgttttgcttcattttttgaaaatagtaattggtgtgaccgaatatggtttccgttgggttatgcccccagagaatcaccagtttggtatccagaagagtatccatcgagttaccgctcgcggccacgccatacgtgtaaggcgtggccgccgcagtattacccagactaactgagtgataatattcaagataaccaccggttaaatttaacagccgacgcgccatcgcatcgccagaaaatgttccaccanaaacagccgtcccgacatggacataacgtgaagctgggccatattgttgcgtgatccttttcaggttatcggcaattaaggtcgtcgcctcatcccatgagatacgctcaaatttaccctcgcctcgtttacctacccgcttcatcggatatttcaaacggtctggatgataaacaaatttacgatagccgcgaccacgaacacaggcgcgcataatcggcatttgtggatccaattcgttatcgggaagcgtggtaatttgcgtcaccacgccgtcgcgcatatgcgcccgaatatcgcacttaccaccgcagtcaaatgtgctacaggtgggcacgactttatcagctactggagctgtaacttctggcgacgcatctggggattgcgcctttgcggtagaagaaataaaaggcaaagtgataagcgcggaagtcgcttgtaaaaaactacgtcgtgatacttgcggaaatgtaatgcgttccttttcgtctggcgtatccatcttgcgttcccgaaaatgaaaaaataaatattcacgtatttattcgagaacaatgctgataacaatcaaataattagtcgtttgaaaaaacgtgagattattaaattattaatgcattccaaatataaataccataattagattaataaatattttgtatatttcactgaaatgaaaaatgtactgacgcgatttgccctacgtcatccatcaccagcaattgataatcacctttatccgtcaaatgcagggtcacgttgcgcccgcgttcagttaacggttcgccattcagaaaccaccagcgttcacctgcccctccacttgattgcaacggcaaagtcgcttccgctgcgcccggtaaacgtttaataatctcgccatcgcgaacgcctgtcagctgcagcgggagctgggcatcgtgaccgtatggcgggcaaattgtcgangccggtggtaagcgcacagcgcgacgttctgatgcgggcaaccagggttccagcggtagcggccagacatttatcatttcttgtcgcgcttgcgggcaatcagcggcaacacgtttgccattttcatccagccagatggggaaacgaatgccattaatgccttcctgctccggcagtaatananttggcggctgactcccgtccagcagccaggttgccaggcggcggcgacagttaccgtcaccttccggcaaanactgtccgcccggccagcaaataacgccacgagtgactgagttcgggcgcgggtcttccggcagattagcactgcgcgacagtaagatattattgacctgattcaacaatggtacggcgctggcaaaaccaaactgaccaacaacgggcgtgccgtccggtctgccagtccagatcccaatgacatagcgagcgttaaccccaatcgcccaggcgtcacgatagccatagctggtgcccgttttccatgccagtggggcgacgcgcggcaaggcaccatccggcaagggtagcgcttcatcagccataatccggcgaatgatccacgccgctcccgacgacattaaaggccgttcaagcagcggatcgtcaggctgtaagcgcaatttgcctgccttgccgtggcgagcaaacgcggtatacgctgccgccatatcttccagtttcgcaccagcgccgccgagaatgagcgaaagattcggcgcagcaccgttgggcaaatataacggnaatccaacattgcgtaactttgccgcaaaccgtttcggtccataggcttccagcacctgcacagcaggtaaattcagcgagcgcaccagcgcctcgctcatgctgatcgggccatgaaaaccgctgtcaaagttgccaggtcggtaatcaccggtacgccgggggacgtcttgcagcagtgatgccgggtggatcaatccttcatccagcgccagaccgtaaacaaacggtttgagcaccgatcctggcgatcggatcgcattgaccatatcaacatgaccaaagcgtgaatcatcgttgagatcaaccgaacccacccagccgcgaacacgcatatcggtatgatcaaccacgatcatcgccagtgagctgcgcggtggtaatcgtcctttccagttttgcgccagttcttccagacgtcgttgaagaccggcatccagcgtagtaacgattttgtcgcttttgcttttaccgagcatcatgcgcgaaaacagcggtgccagttgcggcatttgtcggggtgccagccagatgggttcttcccttgactcttttacctgctcacgggaccacacaccttgcacggccatccgttcgagcactttattacgcgcgacttcggcacgctccggccaacgatccgggcgaagacggctgggcgcttgcggcaaaaccgccagcattgccgcctcggaatagcttaaattcgcaggcgactttccgagataagcccaacttgccgcaccgatcccctgcaacgtaccgccaaacggagcgcggttaagatacaaggtcagaatttcacgcttagacagatgccattccagttgcaacncgcgccagagctggcgaattttgccgccaaatgttttggggtgaggatcaagcagacgagcaacctgcatagtgagcgtgctgccaccggaaataacccgtcccgaagtgagatcttgccatgctgcgcgcgccaccgagaatggattcaccccaggatgcttccagaaccagcgatcttcataattgatcagcgcttcaaggtaacgtggagaaacatcttcgattgttacaggataacgccagatgccgtcagcatcggcgaagcgccagagcggcgtaccatcctgcgccacgaccactcgtgcgggattgacttcatgcagcggtagaggccagagtttatctgctccccacgctgcaagaaaaaggagaaatggcgcagctgccagcgttatccagcagccgcgtttggttaacaagcgaggcatttacggtctgacaatcagcaaatcttcagccgcgccggtcgcccgccattggggaacatacattgattccaccatcggttgcggtacctgatacgttcccggcgtcaccgcccgcgccagatacaccagcgttaccggttggtattcatcaacggcaaccgccgccacaaagcgatcgtcacggaactcaatgtgcttaatactcgcctgctgcatctggttcagtaagttctgcacttcgccaccactttgctccaggctggcgctaccgttcgccagattctggttttccagttccagacccgcaggcagcagatccacgactaacgcatccggcacgctgttactagcttttacctgcaaccagaccagcaccagatcgccgctacgtaacgagtccagcgatttgctcttaccatcagtaccaagaatatgacgctcaatttgcagcacattgttcgccggtaaaggtgcggattgcggataaccgctggcatccacacgcagccataacggctgctcgccactgttggtcacctgcaaggtggcaagttgatcgctattcagattgctgttttgcgctttctcgcctgtcagcggctcagctgagaaagaggtttgcgcctgccatttacctggtaaatcctgaatcgtacgggcagccaggaacaacgcgttactttcctgcgtcgatagccagcgttcaccaaacgcctgctgcgaaagtgtgttcagcagggagtactgctcatcgggtagcagtttgttctcttccagcaaggagagcatcaacgcgttgtcgcgcagtggactaccgtaatcacccagccatatccgctcatcactattacgcggcgtttttagcgccagcgcaatcgcttcttcatcacgcgtcgcatcacccatggttttcagcgcaacgccaagttgcagcagcggtaaaccagaagcggcatctgcacgatgctcccagatttcacgcagcgcacccagcggagccttttgctgacgggccaacaccagcgcagcgtaagactgtacggcgaatttactggctttgagattatccgcgtacgggatcgacatcatgcccggatcttgtaaatagcgcagcagacgctcattaccccggttaatggcgtctgtcggcacgctgtaaccctgttcgcctgcgcggaccaggaaatccatcacgtaagccgtcagccagtactcttcgtcaccgtttttatcccacagcgcaaagccgccgttatcacgttgcatttgcagcaaacgggaaatgccgatatcgaccgatgcacggcgtttctcatcactgtcgcctttgatgcccaacgcctgcagttgggctgcgttggtataaagtgacgggaacaggccgctggcggtttgctcaagacagccgtacggatacgcttttaactctttgatataacgtgcgatgttcagcggtggtttgccgctcaacaacaattgcccttccagcgtaacaggcgagaagttttgcaatccatccgccggaatcgcccatgtctcaccaggctgtaacgccgtaccgtaattaaccgtttgtgccgggaacgccggacggacgccgattttccactgcttatgctgatcggcaacggtttcacccggtaacgctaacccgctaatggtggcctgaatttctccatcgccataacccggcaatgctcgcaccgggataaacagcgtagtacgcacacctggcgctaattcaacggctgcgggtgaatcgctgaccagttcaagcaaaccactggcggtcagggcaacgttcagtttttgcggtttatcggtaagattagtgatatccagcgtcagacgcgagttatcgccactcgccataaagcgcggcatgttcagttcagcaatcaccggtgcggcaactatcactttgctttcgttgctaccgaattcatctgccgtccaggcttgcgccatgacgcgcaattcaccgttaaaatcgccaatcggcagtgtaaccgagccttcgccctgttcgttgagcgttaccggcagcgcctgctgcgcgacaatattgacgtgattgaccggcggtttaccaccacgtttcagctcatcaccatcgccaccgaaacgcagagctgccagacgcccctgaccttcaataacctgaccgtaaatatcgtaaatgtctgcgccatagcgtttctgaccaaagaacgcctgccacggatctggcgtgacgtagtcagtaatattcagcacaccactatcaacggcagacaccagcacattcacctgtttaggcttctcgccatttttagtgctggctttaattttcacggttaatggttgattgggacgcatttttgctggtgtttccagcgccagatcgaggcgacggttttcatcaccaagcggcagatgcaacacaccaaccgcgcgttttggcgtcgcggagcgagatttatcgccaggacgcaccaccagcgtactcaaataaagatcatgacgattccaggttttatcgaccggaatcgtcagatccagcccttgagccggaacatcaatctcttgccaccacagcggcccttcactggactcgaccatcgcataacctttacccgccgttggcgcggcgatatgcaacttaatggtatcgccagggcgataaccggctttatccagtttcagcgtgacacggtcgggtcgcactgcgccgctaccgtcgctattatcctgccagctatagccagcccaaaaacgaacactactgaccgcttcattcggcgctttgacttccagacgataagcgccccactctaccgggaaactgaccttgccggtttcgtccgctttcagatccagagtttgttcattttcaatcagatctttttgatcaaactgtgattgccagccttcatcttctgaccagttccagtagtaatcgcggcgttcgcgaatcaggcgcacctgcaagcccgacacggcttttttcacgccttgcgcatcgctataaacgatgtcaaaagcggcgttactgccttcatcaacaatgggctgtttcaccgtgctgtcagtgcgataatcgtaaaccgatttcgaggcgaactgcggacggatccccggcaatgcatcggcaggccagatagcctgctcagcgcggcgcgtcaccgggcgaccgcccgattccagcaaactgccctggaaaataacctgcaatggggaatgcgtttccttccactggctttctgtagaaacttcgccgcgccctttatcatccagcgtcaactgaacttcatccagcgtgcgggaaaggttttcggcagctatatcgccgaattcaaaaccaggtaaggctgacacagcctcacgcagtgggcgcaggaaaagttgcccttgcaaagtattaccattagcaggcgcaccgtacaggtagtatcccaccacggagaatttcacttcatcattcggcgtaagcggggttttctcaccggtcagattcagcgccatacgctctggcataaaatcttcgacgtggaaatcccacatccgatactggttatcgcccgtgttagcgcgaatatgccacataccggttgccgcattgctatcgagtggccaggtaaagtggtagaggccattttccggctgactaacgacgctcctgagtacctgcccatcgggtttaatcacgtctaacttgatgggttgattgggcaacgctttaccgtctgcatcacgcagcaaaccattgaggattaccgtttcacccgggcgataaagatcgcgcgggccaaacatgaaaaactgtttgctatagcctgnnnngccagcaatgttaaattctgctaagtccagcgccggaagttttaaatcgagtagcgttgtctgaccgtctttacgtgccagcaataatgcggcgtttttatcattttccagctgcacatgcccctgagcgtcactggttgcctgagtcagagtctgccctttctcatttaataaagagacttcaattccttgctgggccgcgccgttttccagactttgggtaaagatatccagacgattgtgataacggtgagctgaaacgccgatatcacttaacgtaaacagcgtcgcgggattactgtaatcgtaacgtccagcctgattcatcacagccagatacacgcccgcctgctgaagcggtttgatatcgcccagcggcagcaataatttttcacgggtgttacgcgcaggattgagatcaaaccgtccggtgtagaccagatccgccatctgcagcagtttgtctgactgccagttcgccagcgaattgcggtattcccattggctaatgaatgctggcagagattctggcttaacgcggaagaagttaacatcgacattattaacgttgagcgccattaccggcagcccttcaacgactttaccaggcagcagcgaaccacggctggcaaaaccgacactgggttggatgtcgcgggtagttatagttttttcgtaatcttttctgaaggttgcgttgttgagtgctttgacctccttgccaattgtaacgatcaaatcacgtttcggttcgaggtggcgtaaacgcagctctttaagattatctgatagctcccaggcaccatccactttgccgctttttttatcgacgacatgaataacgcgtgagaaatcctgatccgggtcgagagggatggagaacgtcagcaccagcgtggctgcaccatcaagttggacttcagagagatccagcaatgtcagcgccttaccggcactctgttgggccagtttttgtcgctctggcgcggagagttttgctgaactcgcgttttctgaagaggccgctttagtaacttcagaaggcgcatcttttttcaccgctgttggcgcgttatcgttgttgtcgcaccctgccagcgccagcattagcatgcaggcggctacgcgtaactttttcatttttcatccctgccacaatggcccgttagcaacgtcgaataattattatgcgtgagaatttacgttatgtaattcagtatcacgcccatacaatccgaattttagtgagaattgtggctcagacagccaaatcagcctcttttgcttgtcgcttttcactaaacatccgacaatttagcctaaccccggcaaaaatggagatgcctatgtccacgacatggtttgtaggagccgactggctcgccgaacatattgatgacccggaaattcagattatcgatgcccgcatggcgtcgcctggacaggaagatcgtaacgttgctcaggagtatctgaatggacatattcccggcgcagtgttttttgatatcgaagcgctttctgatcacacttccccgcttccgcacatgctgccgcgcccggaaacgttcgccgtggcgatgcgtgaattaggcgttaaccaggataagcacctgattgtctatgacgaaggtaatcttttctcagccccacgagcatggtggatgctgcgcacctttggtgtagagaaagtgtcgattctggggggtggacttgcaggctggcagcgcgatgatctgttgttagaagaaggtgcagtagagctgccggaaggagagtttaacgccgcgtttaatcctgaagcagtggtgaaagtaaccgatgtgttattggcaagccatgaaaatacggcncaaattattgatgcccgcccggctgcacgttttaacgcagaagttgatgaacctcgcccaggtttacgtcgcggacatattcccggtgcattgaacgttccgtggacggaactggtgcgcgaaggcgaactaaaaacgaccgatgaactggatgcgatattttttggtcgcggcgtcagctatgacaaaccaattatcgtcagctgcggctctggtgtaacagcagccgtggttttgttggcactcgcgacgctggatgtgccaaacgtgaaactgtacgacggcgcatggagtgaatggggcgcgcgggcagatttaccggttgagccattgaaataagctttttacaggcaataaaaaaccgccgaatttggnggttttttattgctggtctggttcgcggcctttccagcaggttgacttgtgttgccggagcaacgcaggcaccccacagtgttgaaatactctcttttatgcctggctgtgtcaagataataaacagagtaattattcaaacatgagagtattattcttaatggcccttttcgccgtctcgcaaacgggcgctggctttaggaaagaatgttccatgaccgtaaatacaggcaccccacagtgcttgctatcgcggcaatatcgccagtggtgctgtcgtgatgcggtcttcgcatggaccgcacaatgaagatacggtgcttctgtatcgtacttattgtttctggtgcgctgttaaccgaggtaaataataaccggagtctctccggcgacaatttactggtgattaacaaccttcagagcagcaggtaagcccgaatgccgccctttggggcggcatattttagattatccgattctgtttaaagtcacgcaaaaaaccaccccagcgacgttcatagaatggcgcaatatgttcggtaataaagtggctaattcctttttccccttttttcacctgacaaatatcgattggttcatcgccaggtaatgtatcggtcgctacacttcccgccacctgaataatttcttcgatatcaccatcggcttcaatgccaataagtaaattaggctgtgcctcttcgttctctttaattgaacaaataaaagcacgcttcacaggcttaatggttttaaataaggtggtgagtgaatcaatcatttgtgctggcggctctgcgacttccgataatatcagcgattcaccgccttccaggatttcctggctgctcagcggatttccctcttcaccaatcaacaaactgatttcacgcggcataaattctttaccggtcggcagtttggcattaaggaagagcgtttcgccaagggtcatctcaaacaatgtgcgaacgggcattacgacaaatgcctgttcgtcttcaaccgcctgttgaagtgcttctaacgaggtaaaaaaaggaatgacgctggtgccgtcttctttttcccagtgctgtaaatcaagcgcgctatcttcaaccacagcctcgccctgcgccgccgaaccaggcacccagacggtggattccagtagagtacggaaaaaggccgggcggtgcgccggttcggttgctgctttttccagcaggtcttcaagttcattttttgtttcggacataagaaccacaattcattcaacgttcggggcacaagtgcctgatgcgccatacttatcaggcctacaagggattcacaatttgttgaatttgcaatactttgtaggccggataaggcgtttacgccgcatccggcatattagtttacgccgttaacagattagcaatcgtgcgcacaccaagtcccgtagcacccgcagaccactgttcaaccggcgctttacggtaagtcgccgagcagtcgatatgcagccagccttgctgatagttctcaacaaagtgcgacaggaagcccgctgccgtgctcgcgcctgccggatacgccgcgcttccggtattgttcagttcggcaaagttagacggcagctggctgcggtggaattccgccagcggcagacgccagaatggttcgttctcttgtgaggcactcgccagcaaacgaccggcaagcgcatcgtcaaaactgaacagcgcgtgataatcattacccagcgcagttttcgccgccccggtgagggtcgccgcatcaatgatcatttccggtttctgcgcactggcatcaatcagaccatcggcaagcaccaggcgcccttcggcatcagtgttcatcacttcaacttttttaccgttgcgataagtgatgatatcgcccagcttgaacgcattgccgctaatcaggttatccgcacagcagaggaacagcttcacgcgcttgttcagtccgcgcgtaatggcaaatgccagcgccccggtaaccgttgccgcgccgcccatgtccgacttcatcgagtccataaacgcagtctgtttgatgctgtagccgccggagtcaaaagtgatacctttacctaccaggcacgcgtacactggcgcttctttatcgccagttgggttgtaatccagcgccagcaataccggagaacgttctgaaccgcgtccgacggtgtgcagccccatataaccttgctcacgcagatcttcgcctttggtgatccgataagtcacacgatcgctcgcgacgttgctgatcagatcaacagcacgctgtgccagttgcgatggtcccaattcttctgccggtgcgttgatggtgtcacgcacccagtcgatgatcatcaggcggttatccagttcctggcgctgggcatcgtccagatccggccactccactttacgcgtgcctttcggggctttgtaaccttgccagaatgcccagcatcgatccgcatcccagccttcaccgcttaactgaacatgcttgatgcccagaccgtcaatcttgcgcgccgcacgctggatcagccccagatcgtctgccccgttcaaatgcagggtaatgccgtcattattaatgctgtaagttgctttttctccccagcgcgcgtcggcaggttgggtaganagggtaatcttcatcgcttctgtcattttagttatccttctttgtaaaagggccgccagttggcagccccaggatttttccgctaaatgattcgcgttgcaggaaggcggcaagtgagtgaagccccaggagcatagataactatgtgactggggtgaacgagcgcagccaacgcatctgcggcgtgaagcatgacgcggaaattattcggcctcgtccagccagactaacaaaatcgcttcgaggattttctcgttggatgcctgcgggtcgtcgtcgaaatcttccagatcgcaaatccactgatgcatatcggtgaatcgaaccgttttcggatcaagatcgggatacgcatcgtacagtgcttcgccaatttcgcggctatcggtccacttaagtcccatactaacctctgttaatgctcacgcgcatggttgatcgtgtaacgcgggatttcgaccactaaatcttcgtcggtgacgcgcgcctggcagcttaaacggctttccggctccagtccccaggctttgtccagcatgtcgtcttcctgctctgagctttctggaagcgagtcaaaaccttcacgaacgatgcagtggcaggtggtgcaagcacaggatttttcacaggcgtgttcaatctcgataccgttacgcagagctgcgtcgagaatggtttcaccgctattagcttccagaacagcgccatcagggcagagatcctgatgaggcaaaataacaatctttggcatattaaacctcgtccacggaatggcctttcagcgcacgacgaaccgactggtccatgcggcgagcggcgaaatcctgggtttgtttgtctacgtttttaatcgcttgttcgatggcgtcaacgtcatcgccctgcgccacttcactcaggtgagcggcagcatcgtcaatgacctgacgttctgcggcgcttaacagcgcggcatcagcagccagcgcgccgtgcagactttccagcacacgcgccgcttctactttttgttctgccagcattcgggcttttacgtcctgctcggcatagctcattgagtctttgatcatcgaagcgatttcgctatcggtcagaccgtaagacggtttgacctgaatagacgcctcaacgccggtggatttctccatcgccgtcacgctcaaaagaccgtcggcatcgacctggaacgtcacgcgaatatgcgcaccgccagccggtagcgccggaataccacgcagcgcaaaacgcgccagtgagcggcagtcctgcaccagttcgcgctcaccctgcattacatggatagacatcgccgtctgaccatctttaaaggtggtgaaatcctgagcgcgggccactggaatagtggtattacgcggaatcactttctccaccaggccgcccatcgtttcgaggcccagcgacagtgggatcacatcaagcaacagcatttcgctgtctggcttgttacccaccagaatatccgcctgaatcgccgcgccaatagcgacgactttatccgggtcgatggaagtcagcggtggacgaccgaaaaattcgcctacccgttcacgcaccagcggcacgcgagtagaaccgcccaccatcaccacttccagcacttcatcagcttctacacccgcgtctttcagcgcgcgacgacaagccaataaggttcgttttaccagtggcgcgatcagttcattgaattgttcacggctgatttcgccctgccagcccgcaacgttaacggtcacagagtccgcatcgctcagcgcgattttggctgcaatggcggcatccagcagttcacgctgaacgcggttatcgctacgatcaggaatgcccgcctgctcgcgaatgtaatccgccagcagatggtcgaaatcatcgccgccgagcgcggaatcaccgccgattgccagcacttcaaacacgccgcnacttaagcgcagaatggaaatatcaaacgtcccgccaccgaggtcataaacggcgatcacgccttcctgaccggaatccagcccgtaggcgatagccgcagcggtcggttcgttaagtaagcgcaggacgtgaaggcccgccagnngnnncgcgtctttggtgccctgacgctgggcatcgtcaaagtacgccggaacggtgataactacaccatccagctcgcctgccagggcttcagttgcccgcgccgccagtgctttgaggatgtccgcagaaacgcgcaccgggttcagcagccccgccgccgtttcaatcatcggcaggccgttttcgctggcctggaattgataaggcagatgcggatagcgttgctggatatcagccagcgagcgtcccatcaggcgtttaacagaactaattgtgttggcggtatcgagcgctgcattagtacgcgcgtcataacccaccgaatgcccttgctgttgatagtgaacaacagatggcagcaggtgacggccttcatggtcggctaacgtttcggcctgaccgctgcgcactgtcgccaccagcgagttggttgtgcccaggtcaataccggccgccagacgacgctgatgcggcgcagcactcaaaccaggttcactaatttgtaataaggccatgtttagcttccagaaattaaaaatcgagcagnttttcttcgagttgttcggnactgcttcgcagtttatcgagaaaacgcagcttacgcacggtatccgccnccgcgtcccaggtctcgttgtctaactgttcaaccatcaactgatggcgggtatcaaacatctttttcacacgtttgataaagctttccagccgcgcttcatctttcgcctgttcgatctcgtccagctcttcgcgcagctccaactgttccatcaggaacgcggtgtcgcgcacagtatgctgctcgctggcgagatcaaagccgtgcaaagaaagcaaatattccgcgcgcattaacggatgacgcagcgtttgccaggcctgattaatggttgcagattgctgtacggcggcgagttgttccgcctggcttccgctggcgaatttatcaggatgatactgacgttgtagatcctgaaaacgcaggctcagcgcctgggtatcgagttgataacgggcaggcaagccaaagagggtgaagtaatccataacattctcagggctgcgatccgccgcgataacggcgaatcaggtaaaacaaaccccacgcgcaggcgaccacggtggggttatcggtatgcgcatcaaacgtggaagctttcgccgcaaccacactcatctttaacgttcgggttggtgaatttaaacccttcgttcaggccttcttttacgaagtccagctgcgtaccgtccagaaattgcaggcttttgccatcgaccacgactttcacgcctttgtcttcaaacacgatgtcttccggcgtcggttcgtcaacaaattccagtacataagccatacctgaacatccggaggttctcacgcccagacgtaggccaaaccctttgccacggttagccagaaaggtatttactcgcgctgctgcactgtcgctaagtgtaatcgacataaccaaacctcaactcttattttgcttcacgtttgcttttatagtccgcaatggcggctttgatcgcgtcttctgccagaatagaacagtgaattttcaccggcggcagttcaagttcttcagcaatatcggtgtttttgatagcctgcgcttcgtcgagagacttccctttcacccattcggtgaccagggagctggaagcgatagcagaaccgcagccgtaagttttnnnnnncgcgtcttcaatgataccttcatcgttgactttaatctgcaacttcattacgtcgccacaggccggtgcacccaccatgccgctgccgacgttctcgtcgttgttgtcaaaggaacccacgttacgcggattctcgtaatggtcgataactttttcgctgtaagccattataaattctcctgattccgatacngattaatgatgagcccattcgatgctgttcagatccacgccctgcttgtacatttcccacagcggagaaaggtcacgcagacgaccgatggatttacgaactaactcgatggtgtagtcgatctcttcttcagtagtaaaacgacctaaagagaaacggatagagctatgtgccagctcgtcgttcagccccagcgcgcgcagcacgtaggacggttcgaggcttgctgacgtacaggcggaaccggaagaaaccgcgagatctttcagcgccataatcagcgactcaccttcaacgtagttgaagctgacgttgagaatgttcggcgcaccgtgttccaggtcaccgttcaggtaaacttcttcgatatctttgatgccgttccacagacggttacgcaggccgcgcagacgttccatctcggtcgccatctcttcttttgcgatgcgataggcttcgcccattccgacgatctggtgaacaggcagagtgccggaacgcataccgcgctcgtgaccgccgccgtgcatttgcgcttcgatgcgtacgcgcggtttacgacgcacatacagcgcaccgatacctttcgggccatagattttgtgaccggagaaagacatcaggtcaactttcaactggctcaggtcgataggcagtttgcccacgctctgggttgcatcaacgtgatagataatgccacgagcacggcacatttcgccgatagccgcgatatcctgcaccacgccgatttcgttatttacgtgcatgatagaaacaaggatggtgtcgtcacgcatcgctgcttcgagttctttcaggtcgataataccgttacgctgcggtgcgaggtaggtgacttcgaaaccttcgcgctccagctgacggcaggtatccaataccgctttgtgttcggttttgctggtgattatgtgcttgccttttttctgataaaagttggctgcacctttgatcgccaggttgtcagactcggttgcaccagaggtaaagacgatttcacgcggatcagcgccgaccagatcggcaatctgattacgggcgatatctaccgcttcttcagcctgccagccgaaacggtgagaacgggaggccgggttaccaaaggttccgtccatcgtcataaactgcatcattttctcggcaacacgcgggtccaccggcgtggttgcggagtagtcgagataaatcggtaatttcattgctctataaactccgtacatcactcaatgcaaggaaccaggctaccggctagatgtacgaccgtgtttacggagcgcgatacgccccggcctgattctgaatactttttattaagcgcgtaacttaacgtcgatcgcgtcttgtgtgcgggtgcgtggcgcgtcgtgagtatgctgacgaccagacacatccagcacttcctggttgttaaccagttcgcctaaagtaatgttattgagaaaaccggtaagacggtcgctcaaatcacgccacagcgcgtgggtcaggcatttatcgccgccctggcagccgcctttaccctgacaacgggtggcatctacagattcgtcaacggcgctaatcacttcgccaacggcgatgctgctggcatctttgcctaacagataaccaccgcctggtccacgtacgctggaaaccagaccatttttacgcagacgagaaaacagttgttccagataagaaagggaaattccctgacgttcggaaatatcagccaacggtaccgggcccgcttcagagttgagcgcaacgtcaagcattgcggtcacggcatagcgccctttagatgtcagtctcatgtcttacttcacctcaaactcgcccctgcccggggttttttattgtaaaagtgggggtattgcatagcagggtcaagtctgacattcccgagtaaattggtcaactatttacttgactgatttagtcgggtatttaaccttcagtgccatttttttatcgtggcgtttgtacctgttatccttccagaccatgggcgggttgagggcaattattcgcattagcgcaggcctgttcccctcaccctaaccctctccccgaaggggcgaggggaccgtccgtgcacttatctggcttagccctcaggccttattacctttattctgctgctctatagaagccagaatcccgcgcaggatattcaattcctggctttccgggcgcgcacgggtaaacagacggcgcaatttattcatcacctgccccggatggttttcacggataaaaccggttgccagcagcgtttgttccagatgaccataaaaacgctccagatcatcgaccagcggatacggcgtctcttcatgctcgacctgctcgccattttcctgagttgccagccaggccatacgcacttcataggcaataacctgaaccgccatcgccaggttcagcgagctgtattcagggttagcggcaatcgcgacatgataatgacacttctgcaactcttcattggtcaggccgacacgttcgcgaccaaacaccagcgccaccggggtatttgccgcttcagcaacgcttttcagaccgcattcgcgcgggtcgagcatcggccacggcagcgtgcgggaacgtgcgctggtgcccaccaccaggctacaaccggctaacgcttcgtcgagcgtatcgacgatgtgagcattaccaatcacatcgctggcccccgccgccagggcaatcgcctgggagtcaggtttcaccagtggattaaccagccacagattggttaatcccattgttttcatggcacgggcaacagaacccatattgccggtgtgtgacgtctccaccagcacaattcgaatattttgcagcattgtctttcttcgtctaaagattattcgcgcatcttatcataaaacgaagacagatgccgatctcgctgctatactctgcgccgttttcccgttctttaacatccagtgagagagaccgatgcatccgatgctgaacatcgccgtgcgcgcagcgcgcaaggcgggtaatttgattgccaaaaactatgaaaccccggacgctgtagaagcgagccagaaaggcagtaacgacttcgtgaccaacgtagataaagctgccgaagcggtgattatcgacacgattcgtaaatcttacccacagcacaccatcatcaccgaagaaagcggtgaacttgaaggtactgatcaggatgttcaatgggttatcgatccactggatggcactaccaactttatcaaacgtctgccgcacttcgcggtatctatcgccgttcgtatcaaaggccgcaccgaagttgctgtggtatacgatcctatgcgtaacgaactgttcaccgccactcgcggtcagggcgcacagctgaacggctaccgtctgcgcggcagcaccgctcgcgatctcgacggtactattctggcgaccggcttcccgttcaaagcaaaacagtacgccactacctacatcaacatcgtcggcaaactgttcaacgaatgtgcagacttccgtcgtaccggttctgcggcgctggatctggcttacgtcgctgcgggtcgtgttgacggtttctttgaaatcggtctacgcccgtgggacttcgctgcaggcgagctgcttgttcgtgaagcgggcggcatcgtcagcgacttcaccggtggtcataactatatgctgaccggtaacatcgttgctggtaacccgcgtgttgttaaagccatgctggcgaacatgcgtgacgagttaagtgacgctctgaagcgttaatgactcaggcgggtgatatcactcacccgccctcgcctttcaggcgctattccgaaatacttcctcaccgctttactttctttcgtcactctcccaccatctttccccgattaatggatgataaagaagtcgcaaggaaaggttatggcactgccagtgaacaaacgcgttcccaaaattctgtttattctctttgttgttgccttctgcgtttatttagtgccgcgcgttgccatcaacttcttctattatcctgacgataaaatttacggtcccgacccctagtcgnnnnaatccgtcgaatttacggctaaggacggtactcgtctgcaaggctggtttattccttcttcgacgggccctgctgacaacgccatcgcaaccatcattcatgctcacggcaatgccggaaatatgtccgcccactggccgctggtcagttggttacccgagcgtaatttcaacgtttttatgtttgattatcgcgggtttggtaaatcaaaaggcacgccgtcccaggccggattgctggacgatacgcaaagcgccatcaatgtggtgcgccatcgcagtgatgtaaacccacaacggctggtgctgttcgggcagagtattggcggggcgaatattcttgctgttattggtcagggtgatcgtgaaggcatacgtgcggtgatcctcgactccacatttgcctcttatgcaaccatcgccaaccagatgatccccggcagtggctacttacttgatgagagttacagcggcgaaaattatatcgccagcgtcagcccgatcccgcttttactcattcacggtaaagctgatcacgttatcccatggcagcacagcgaaaagttgtatagcctggcaaaagagccaaaacggttgatcctaatcccggatggcgaacacattgatgctttttccgatcgtcacggcgacgtttatcgcgaacagatggtgaactttatccttagcgcgttgaatccgcagaactaacccatgatcgctagcacgataatcattcacaaaatcaccttaagacatgctaatccactggtcaggacagtttaagatgagaaaaattctgtgacgcttgccaacatttctgatgattagcattcccttcgccatttccctgagcaaactttagctattcttatcaattatgcttatgggagatctacagatgatgcctacgcttgctccaccatctgtcctttcggctccccagcgccgctgccagatcttgctgacgctctttcagccggggttgaccgccaccatggcaaccttcagcgagcttaatggtgtggatgatgatattgccagtcttgatatcagcgaaacaggacgggagatcctgcgctatcatcaactcacactgacgactggttatgacggtagctaccgggttgaaggtacagtgcttaaccaacgtttgtgtttatttcactggctacgacgtggtttccgtctgtgtccgtcatttattaccagccaattcacccccgccctgaagagtgaactgaagcggcgcggaattgcgcgtaacttttacgacgataccaatctacaagcgttagtgaatctctgctcccgacggctgcaaaaacgctttgaatcgcgcgatattcatttcctgtgtctgtatctgcaatattgtttgctgcagcaccacgctggaattacgcctcagtttaatccgctccaacgtcgctgggcggaatcctgccttgaatttcaggtagcgcaggaaattggacgccactggcagcgtcgggcgctccagcctgtaccacctgatgagccactgtttatggcactacttttttccatgttgcgggttcccgatccattgcgggatgcgcatcagcgggacagacaattgcgtcagtctatcaaacgtctggtaaaccattttcgtgagctgggaaatgttcgtttttatgatgaacaggggttatgtgatcagctttatacccacctcgcccaggcgttaaatcgcagtttgtttgccatcggtattgataataccctgccggaagagttcgccagactgtatccacgcctggtacgcaccacccgcgcggcgctggccggatttgaaagtgaatacggcgtccatctttctgatgaggaaagtggtctggtcgcggtgattttcggtgcctggctaatgcaggaaaacgatctgcatgaaaaacagattattctactgaccgggaatgatagcgagcgagaagcgcagattgagcaacagttacgcgaactaacgttactgccgctcaacattaaacatatgtcggtaaaggcatttttgcagacaggcgctccgcgnggcgcggcactgattattgctccttataccatgccgttaccgctcttttcaccaccgctgatctatacggacctgacactgacaacacatcaacaggagcagatccgcaaaatgctcgaatcagcatgagggaacaactttcgggcgcaaaaacattgccggaagcgccaccagcgccatcacccagaacacgccgtggcccagatattgatacaggaaaccggcgaaaacggtcatgatagcgatactgccgcccatcgcgacggcagagtaaaccgcctgtaaacggatgacttcgctaccctggcgagcagcaatatagcgcatggcggccaggtggcagaccgtgaaggtgccgcaatgcagaatttgcaccactatcaaccacggcaacgccgtagttgctcccataatgccccagcgcactacgccgcaaatcgctgagatcaacagcatatcgcgtgcactacaacggcggaaaagtttattactcagtgcaaagataatgacttccgccaccacgcccagcgaccacaaataccccaccgccgaggccgagtagccagctgcctgccagtaaatggcgctaaaaccgtaataggccgcatgtgccccctgcaataaacaaacgcaggccagaaagcgccagttctggcgaaccagcgccaaccacgctgaccaaccggtgctctcctgctggcggcttgccccttgtggctgaatcgtcggacggatgagaaagccgagcagcatggatgccacgcccaangtcaacagcacgaggatcacccgataatcaaacatagtgaccagtttgcccgtcagcgccgagccaatgacaaacgccaccgagccccacagtcgcactttgccgtaatcaagcgggaactgcttttgccacgtattcgccagtgcatcggtcaacggtaccagcggtgagaaaaagaggttaaagccaatcatcaccagcatcagccacgctacgtgcgcccccgcccagaaggcgacagcaaagagaagtgtcagcagtgccagcacgcgcaaggcggaaatcaggcgagaaggatcgctgacgcggggcgcgatgagcaaactcccgagaaaacgggcaaccagacctgcccccaataacaggccgatggtttctggcgttaaaccaatccctttaagccagacgctccagaaaggtagaaaaatgccgtaactaaaaaagtatgtgaaatagccgagcgccaaccagcgcgtggattgcaaaaccatgagtccctcccgtcaggaggcgttagtctggagttaatcgaatgttggtgcaagttgaaaaataagaatattcgagcctgcttcccgatgtctgtaacgccagttcacaagcactcaaaaactgcgatccngtgacgcatgttgcaaagataatgcgtaattatgccgttacgcttgccaaacgttcctgcacaatggcgatgaaatcgcgtaatgccggcttcatctcccctttcttccacgccatcagtaaagcaatggaaggcacatttccggcaatgggacgaaaaacaacctgcccggtattaaaattattcatataaccgggtatcaaagtgacgcccagccccatgcccaccagattcatggtcaccagaatattcgttgccacctggacgatatttggctggctgttttcttgtgcaaaccacgctttaacgatcggcgcaagcgaaccggaatacgccggatcggtactgacgaaattcacgccatccagttgcgcggcggtgatctctttttcatgtgctaaagggtgatcaaccggtaacaccaccactaatggttcgtcaaaaagctccagataatcaatctccgggctataaacaggatggcgcattaagccgacgtcgagttcaccacggcgaattttttcctcctgttgcgtggtgattaaactcaccagctcaatcaaggtgtctggctgtctgagacgaaacatcggtaatacttttggcagtaaattcacttccgccgatggcacaaagccaatggttaattgtctgtcttcctgaacaattttccgcgcccgtaatttggcattttccgcttgttcgaggattgccagcgcgtcctggagaaaacattctcccgccgccgtcaacgcgactttgcgcttatccctcaccagtaacggaacaccgacacagttttcaagatcgcggatctggctgcttaacgaaggctgtgaggtatgcagtttttccgccgcacgggtaaagttcagtgcctgcgccactgcgacgaaatagcgtaaatgccgtagttccatcaccttccccttgttatcgaaaaaacgtctcagctggtagaaattaactatttcacatattagcaaccaaccagcaacatccttatggcacaaaaatagaaggtcaatacatcttatctttcaggattaaaaaatatgaccacaccctcagatttgaacatttaccaactgattgacacccaaaacggtcgggtcactccgcgtatttataccgacccggacatttaccaactggagcttgagcgtattttcggtcgttgctggctatttctcgcccacgaaagccagatcccaaaacccggtgatttctttaacacctacatgggagaagatgcagttgtcgtggtgcgccagaaagacggcagcatcaaggcgtttctcaaccaatgccgccaccgggccatgcgtgtgagttatgcagattgcggcaacactcgcgcctttacctgcccgtatcacggctggtcttatggcattaacggcgagttgatcgatgtaccgctggaacctcgcgcctacccacaagggttgtgtaaatcccactgggggctaaacgaagttccttgtgtggagagttataaagggctgatttttggcaactgggataccagcgcaccgggcctgcgtgattacctgggtgacattgcctggtatctggatggcatgctggatcgtcgcgaaggcggcaccgaaattgtcggcggcgtacaaaagtgggtgatcaactgcaactggaaattcccggcagagcagttcgccagtgaccagtatcatgctctgttcagccatgcttctgccgttcaggtattaggggcgaaagatgatggcagcgataagcgcctcggtgatggacaaaccgcccgcccggtgtgggaaaccgccaaagatgccctgcaatttggtcaggatggtcacggcagcggcttcttctttactgaaaaaccagatgctaatgtctgggtcgatggcgcagtttccagctattaccgcgaaacctatgccgaagctgaacaacgtttaggtgaagttcgcgccctgcgcctggcgggtcataacaatattttcccgacactttcctggctcaacggcactgccacactccgcgtctggcatccgcgcggccctgatcaagttgaagtgtgggcgttctgtattactgacaaagccgcctccgatgaagttaaagccgcttttgaaaacagcgccactcgtgcttttggtcctgctggttttctcgagcaggatgactcggagaactggtgtgaaatccagaaattgcttaaaggccaccgcgcccgcaacagcaaactgtgtctggaaatggggcttggtcaggaaaagcgccgcgacgacggcattcctggcattactaactatatcttttcagaaactgccgctcgtggaatgtaccaacgctgggccgatcttctgagtagcgaaagctggcaggaagtgctcgataaaaccgccgcttaccagcaggaggtgatgaaatgagtgcgcaagtttcactagagttacatcaccgcattagccagtttctctttcacgaagccagcttactggacgactggaaatttcgtgactggctggcacagctcgacgaagagatttgttacaccatgcgcaccacggtgaacgcgcaaacgcgcgaccgccgcaaaggtgttcagccgccgacaacctggatttttaatgacaccaaagaccagctggagcggcgaatcgcccgtctggaaacgggcatggcatgggcagaagagccgccgtcacgcacccgccacttaatcagcaactgccagataagcgaaaccgacatcccaaacgtatttgctgttcgggtgaattatctgctttatcgggnacaaaaagagcgcgatgaaacgttctatgtcgggactcgttttgacaaagttcgccgtctggaagatgacaactggcgcttgctggaacgggatatcgtcctggatcaagcggtaatcacttcccataacctgagtgtactgttctgatgaatcgaatttatgcgtgtcccgttgcggatgtgccggagggtgaggctctccggatcgatacctcgcccgtcatcgccttgttcaacgttggcggcgagttttatgccattaacgatcgttgcagccatggtaatgcgtcgatgtcagaagggtatctggaagatgacgccacggtggagtgcccgctacacgccgccagtttttgcctgaaaacggggaaagcgttatgcctgcccgccaccgatccgctcaccacttatccagtacacgttgaaggtggtgacattttcatcgacttaccggaggcgcagccatgagcgatctgcataacgagtccatttttattaccggcggcggatcgggattagggctggcgctggtcgagcgatttatcgaagaaggcgcgcaggttgccacgctggaactgtcggcggcgaaagtcgccagtctgcgtcagcgatttggtgaacatattctggcggtggaaggcaacgtgacctgttatgccgattatcaacgcgcggtcgatcagatcctgactcgttccggcaagctggattgttttatcggcaatgcgggcatctgggatcacaatgcctcactggttaatactcccgcagagacgctcgaaaccggcttccacgagctgtttaacgtcaacgtactcggttacctgctgggtgcaaaagcctgcgctccggcgttaatcgccggtgaaggcagcatgattttcacactatcaaatgccgcctggtatcccggcggcggtggcccgctgtacaccgccagtaaacatgccgcaaccgggcttattcgccaactggcttatgaactggctccgaaagtacgggtgaatggcgtcggcccttgtggtatggccagcgacctgcgcggcccacaggcgctcgggcaaagtgaaacctcaataatgcagtctctgacgccggagaaaattgccgccattttaccgctgcaatttttcccgcaaccggctgattttacgggtccgtatgtgatgttggcatcgcggcgcaataatcgcgcattaagcggtgtgatgatcaacgctgatgcgggtttagcaattcgcggcattcgccacgtagcggctgggttggatctttaaggaagtacgatgaaagaaaaaacgatcattattgtcgggggcgggcaagcggcggcaatggctgcggcctcgctacgccagcaagggttcaccggtgagctgcatctgttttccgatgagcaacatcttccttatgaacgccctccgctctcgaaatccatgttgctggaagattccccacagttgcagtctgtgttacccgctcactggtggcaggaaaacaatgttcatctgcattccggtgtaaccatcaaaacattgagccgcgacacacgagagttagtgttagccaacggcgaaagctggcactgggatcagctttttatagcaaccggcgcggcagctcgaccgctgccgttacttgatgcactgggagaacgctgctttaccctgcgccatgccggtgatgccgccagactgcgagaagttctgcagcccgaacggtcagtcgtgattgtcggtgccggaactattggtctggaactggctgccagcgccacgcagcgcagatgtaaggtgacagtgattgaactggcggcaaccgtcatgggccgtaatgcaccaccgcccgtgcaacgctatcttttacagcgccatcagcaggctggtgtgcgcattctgctcaataatgccattgaacatgtggtcgatggtgaaaaagtagaactgacgctgcaaagtggcgagacgcttcaggccgatgtggtgatttacggtattggtatcagcgccaacgaccaactggctcgcgaggccaaccttgatactaccaatggcattgtcattgatgaggcttgccgcacctgcgatcccgcgatctttgccggtggcgatgtggcaatcactcgtcttgataatggtgcactacaccgctgcgaaagctgggaaaacgccaataaccatgcgcaaattgccgctgccgcaatgttagggctaccgcttccgctactgccgccgccgtggttctggagtgatcagtacagtgataacttacagtttattggcgatatgcgtggcgatgactggctttgtcgtggcaacccggaaacccagaaagcgatttggtttaatctgcaaaacggcgtgcttatcggtgcggtaacgctgaatcagggacgtgagattcgctcaatccgcaaatggatccagagcggcaaaacgtttgatgcgaaacagctgacagatgagaacatcgcgcttaaatcactgtaaccaggataattagcgaatatctcaacgcctggggcgtggcgaggtaccagagtgtgtattacgtttaaatcacattatcttgcaaagggattggttatgaactcactacgttattttgattttggtgctgcccgccccgttttgttattaattgcccgtatcgccgtggtcctaattttcattatttttggttttcccaaaatgatgggctttgacggtacggtccaatatatggcctcgctgggcgcaccgatgccgatgctggcagcgattattgcggtagttatggaagtgcccgccgcgatattaatcgtgcttggctttttcacccgtccgctggcggtactgtttattttctacacgctgggtacggcggtgattggtcaccattactgggatatgaccggcgatgccgtcgggccaaatatgattaatttctggaagaatgtcagtatcgctggcgcgttcttgctattggcaattaccgggccgggggcaatttctctcgatcgccgttaggaaagatgccggatgcggcgtgaacgccttatccggcattttataaattacagccactctacccgcaacgacatctctgaggttgttgattcccccggcgcaagcgcaatgaggtcacccccttccgggcgatgatggtcatccggcgcatggctcatcggctccagacagaagaaatcaaacgcatatcctttatcaaacgccgggtcggaaacaaagatgaaataacacggtgcaggtggcgtcgtttctatgatgatggcataaccctcctgcggctgctcgatgcgggcctgaccattccatccggcaaaaccattgttcacccactggcgcggcaacggcgctagctggttaaaatccagttcttgcggtagctgctcgcaaaactcacccgccagccactgctcccgctccagccagtaaccgctcgcctgtgcctgaatccgcgtttgcggcgacaacggaaaataaggatgccagccggtaccaaatggcagcgtctctgccccttgattggtgacagagagcgtcaccgtcagcgtatccgccgttaaatgaaacgcctgacttacccgatagtgatagacaccgctgcgatgttcatacaccagacacaaactatcatcgctgtgcgagacacattgccactcgcccagccagccatcgccgtgtagatagtgcgcatcccactcaacattcggttgcagttgatactcacgcccctgccagacaaaacggttgccgctcacccggtttgcaaatggcaccagcggaaaacaagaggcatcggttgccacaccgctttttttaccaggacgtaagagcggcgtcgtatcgcgccagaagccttcgattacgccgccctggtcagaaacgcccagctttagcgacccgtgggataaggtatagatggtcatccgctaactccttaatccgggaagttaatcacaactttcccgcatttgccgctcgccatcagcgcataggcatcacctgcctgttccagcgagaagcgatgggtaatggcgttacgcggccacagcttccagtcagtcaaatcgtgggcgcatttttccatatggaacagactggtcacccaggagccaataatccgccgttgatggtgcatcagatcggcgctgacctcgaattccacttttccggtttcaccaatgtaaaccacccgcccccagtcagcggtggattgcagtgccagtaagcgacctgcggcattaccggaacaatcaagcgcaacatccgcgccgccgtgagtgagttcggcgattatctgcggcagaccttcagtggtcgctaaatagccgtgatccatcactcctaactgttttgccatcgccagacgttccggcagcatatcaacgccgataatccgttttgcaccgcgacctttcgccagcatcatcgccatcatgccgactggccccagaccgaccaccagcacgttatcactgccggaaacttcgccgcgcaaaatcccttcataggccgtgccaacgccgcaactgataaacgcaccatcttcgtagctcagcgcatccggcaggaggatcagatctttttcttccgccagcaagtattcggcatgaccgccgtcacgctgccagccgtaagccgcttttccttcgccagtacaagaaataggaaaaccgcgacggcagttcgggcaaaaaccacagccagaaatgtgatacaccagcacgcggtcgccctctttaaaatggcggcagccttgccccatctccacaatctgcccgcacggttcatgaccgttgataaatccctggtacaacggtttatcgggtgccgccgccgtagcgcggtgctggtggtagatatagtggacatcgcttccgcaaattccggaggatttcattttgatcagtacctggttaatccccggcgtcggcactgcaacttcccgcagatcgacggtcgaatttcctggtaaataagctgccagcatcgttttcataaatccctcattaacaatacgattaattttcatccctgccgcacccgcgccaggggcgttaaggtttagcgtttcgctttactgctacgctgggtcagcaagatattcgccagcaccgccaccacgatgatgacgccgcgcaccacctgctggaaaaaggagttaatcccgagcagcaccagaccgttaccgattagcgtaatcaccagtacgccaagcagcgtaccgaacaacgagccgcgaccaccggaaagcgccgtaccgccgaccacgaccgcggcgatgacgtcaaactccagaccgtttgcggcacctgcgttaccggaaccgaggcgcgccgccaacaaaatgccggtcaccgccgctaataatcccgaaagggtaaagataagaatgcgtacccgacgaacgttaataccgcacaactgcgccgccgtggcattaccgccaacggcaaaaaccgagcgcccgaaggcggttttgcggctaatgaacacaaacagcgcaaacagcaccatcatgatcagcgcggataccggcacaccgagaaattgtccgcccagccagtccagcacctcgttttcgtcaatcggcactggcagagcgttggtcataaacaagcccattccgcgcagggcgctccacagccccagcgtggccacgaaacttggcacgttaaacacgccacgcagcaccccggcgagcgttcccatcagcgcgcctaacagcaacaccagcagacaagcaatcgccaacggaacttcaaattgcagcaaaaatgccaggcacaccgagacaaaagccaccatcggcccaacgctgacatcaatttcaccggagataataatcagcgtcatcgcccaggcggcaatcccaatggtggcggcatcgcgcagcacgttcatctggttattcaatgagataaagccaggcgcgttcagggagaagaccagataaagaatggcaatcaccaccagcaaaccgatctcattaatatggcgactgacaaattgtttgagcgagacgctcttgccctgcggcaatggtaatgacgaagcagacatcttcaggttcctcggtaaaattcatcagtgcacagacagaatggcggacatcagctcatccacattgaccggagcgtgaaactcctgcgagaacgtgccgtgctgtaataacaggatgcggtcacacaccaacggcaactcctccacttcactggagataaacaccacgctttttccttcggcagccagctcacggacaatacggtaaatctgctgtttggcttcgatatcgacgccgcgcgttggctcgtcgagcaacaaaatctggctggcggcatagacccaacgaccgatcactactttttgctgattgccgccagaaagcgtgccgatgggcgtttcgctactggcggccttgaccgtcatccgctgcatcacttcttcggtcaggcggcggatggtggaccattgcagcactccgttggcgctgattttttgccgattggtcagcactgtattttcgtcaacgcccaaccagggaatgatccccgcttctttgcggttttctggcgtatagccaatgccgcgtttcagcatgtcgccgtaatcggggcgcgtgattttctcgccgttgataacaatttcgccctgttcatacgtctccagcccaacaatcgccttcagcaattcactgcgccctgcccccagcagaccagcaatgccgagcacttcgccacgacgtagcgtaaagctgatatcctccagcttgggcttatggcgtaacgcacggacttccagcacggcctgatccacaatttcctgaggtgcaaccggcgcaatatcaacgtgatcgcgccctagcattagcgacacaatatgatgcgtggaagtgttttcgagcatcacatcgccagccacctgcccgtcgcgcataacggtggcacaggaggcaatgcggcgaatttcttccatccggtggctgacataaatcaccgccacgcccagtgctgacatctttttcaccgctctgatcaccagttcaacttccgcactcgcaagcgaactggtaggttcatcaagaatgaccacgcgcggctcgcccttcatcacccgcgcaatttccaccagctgcttatgcgccgggcttagtgttgaaacaagttgttcaggactaacgtcaacgcccagcgcctgtaagcaacgttgggcatcctgcgccatttgcaggtaatcaatcatgccgttgcggcggggccactgaccgaggcagaggttttccgccaccgtcagcccttccaccagacttaactcctgataaaccgcgcgtacccccagttcagcggcacggcgagtcagcgtagcttcgtcaccttccagtcgcgtctcgccaatccagatttcaccgctatccggacgttcactgccggtaagcattcgaatgagggtcgatttgcccgcgccgtttttgcctaacagcgcacgaacctcgcctttattgagcgtgaagttaacgttatccaacgcaacgacgccgggataacgcttatttcctgccaccacttttgctaccgggactgcctctgttgccgtgaacatagggacctctgcgaatcagcgattagggcagaccatcaacgtgcgttgccagccactgtttaccgtcttccgttttggtatagagatcgataggcacctgaatcactttttcaccgtcggcttgtttattgataaccttcaatgtttgcgcgaaaacagcattgcccattttcttaccggaaatatccactaccgctttcagcacctgattgttttccagctcctgagcaatttcggttgtcatatccgaaccgaaaacagcaatttttccggcctgattttgattacgtaccgcttttaccgcgccgagtgtcgcaccgcccgattcccccataatggcgttgagatccggcgtggagataatcagtttttcaccaacggaaatcgctttatctaaaacagtcccttcctgattagcgacaatttgcgcgccgggaacgcgggattttaatacttnttcaaatcctttacgtcgctgcacacaaacttcaaaggcttcgcaattgatgacggcaattttcggctggtcaattttattggcaataaaataatcggcggcagcgttacccagttttttaccaaattccagcgggtcacccaccagatacgccgagacatatttatcgacccccttttgattaatacaggtgttgtagcaaatcaccggaatacccgnttcactggcgcgacgaacggtacggntactgccattttcagacactgccgataaaataatagcatngacattacgcgccacgagggtatcaacaaaggtactttctttcgaaatatcaccctgggcgttagtttcaattaactgtacctgtactgaagaatcttttgccgcatcctgaactccctgacgcactccagcgtaatatccctgagtatcaaggtatattgcgccaatggtcatttctttatccgcagctctggcaaatagtgcgctacctaatagcgtagccattaataatagattacgggttgttctcatttttttaggcatagagcctcctgtagggtttttattaacaacggcttattctaattattttgtgatgagcggcagcgcgtgccgctcaaatattacagttaatagggtttagtgaacgtagttaaaaataaaaggcatcacggtggtgaataatgccgctttcggccaggccggattaatcgccgtcaattcagcgcgagcagattcgtattgcgcaatctcgcctaatcccgcggccgccagcatcgccaccatcaggcatttttctttatgctgctgttgtaaatcgccatacagcgacaacaagtcaggctgcgagacggcaaagaaatccgcttcgatactggttttcgccatctcttgcgcccactgtttcatttcactaaacagttgctgtgcggtgtgttgttcgcccagtaatcgcagcgccattccttgccagaagaggtaatcaaccggctgatcgttgtaatagctgtggatgttaatggtgcgatcgccggtcgccgccagatgtaaacagcgcgtcgcttcagtttcatcgccctgggctttggcgcatatcgcctgccagaaccagatgtcgttatcagtttgccccggtaaacggccttcgcttaaattctccggataatgcagcgcggcatgaagcagttcgctggcctgctgcggctctctggcatcaagatgctgccaggcgcgtaataactggttgaggataaactgactggtgaccttcccttccccgccttcccacgggtggaatttgcgcgtggcgagaatgtccgccgctttgtctgcctgccccgtgagatgccacaaattgagcagttctgcggtcatgtcgtcgcgtttcagcgcaatttccagattattttccagacgcgccagtcgtttctccggtgtggttccacttagcttatcaagcaaatcccgttcgaaaagcagacgtgcatcctgcggcgcaagctgataagcattatcaagataacgcgcggccagctcataatcgtgttgcttattccacgcatggatcgctaacccgcgccagccgtcggcaaactccggcgacatctctacgcaacgttgccataaggcaatggcttcgttgtagctacgtttgttgtagtagaagcaggccagtaaatggcgagcaaaccagcactcttcaatactctccagagccgccacttcttccagcgtattcgggaaacggacaaactgcgggaagacatcaatggcttttgcgaccagttcgccacgttcggctttcggcagcaagctggcttgcaggtaaagcggcagcgtgcgctggcagtccagtgcgttcagcatctctgccgcgagggtgggcattccccagttaatcagttgcccggcggtcatcagggcgttaacgtcgcgtccctgacacagaccgcgccactgcgcgagagctgattcgctacgaccatcgaaccagttcaggcaccacagagtggcgttcagcggataatcgcgcagcagtttctcgcgctgcaaacgcgcgttgtcctgacgaccacttaacaccagcagcagattatgcaggcaaagcacttcctgattggttgggcaggcgcgaagactttgttggcaaaaatccagacccgcgtcgaagttaccattacgcgccgccagtcgtgccagaccataatagcctccggctttactgttgccgctccagaccgcacgccagaaatcctcttcggcttgttgatattgtccctgacgttcgtaagcactggcgcgaatcaaactcgcctgtccgcactgcggatttttgttcagcgcatgtgcgcgtttcagagcctgagtggcatacgccaccgcttgcgggaaatctgcgcggttatactccagcatcgccagcgccagattacagcggtaatccagcggatccagcgccacgccgcgcaggtagtaatcgaacggtgaacggctggcgtgatgatattgctccagatgctgaccgataaaccaggcttcatctgtactggtaatgtcttgtgctgacagtggcgctttggcgacgtccggcaacggcaactcttgcggctgatgttcctgataactcagtacaatattgccgtcggcatcagagagctcaatggtcagtctttcaggattgataccgtgtaacacgccctggatggcggtcgctggtgtcagggccacggcatcatcgagcaacgcgtcgcatttgccgatttcgcggatcgccaggcggtatccgttcaacggagagatggcatacagcccccactcaatcccccgctcactacgctggagtttgattaccgcatcgcgggaggcgttttgcaccatgcccagagaatggtaaggcaggaaaaactgctcaaaacgcttctcttcgtaagcatcaagccaggtaaaatcaggctggttatcggcaaaaataccggtcatcagttcgatatacgggccgttattatcagttaggctcttatcccacgcctggccaaattcactgtgtccccagctccactgctttttacctggcgcaatatggtggttggcaacgtgtagcaaaccgccatcttcatcgtgacaccacgcgccaacaaaatcgtactgtgatttttcagccatatatgaggttggaacgggcacatttttatagcgagaaatgtccactccagcggagtagtccactttgtagtaagtgccggtggcgatagggaaagcggagacggcccgtttgcngtgatcaaacaccgccgttacatccggcggaaagacgntctgatgcccttcaccccctttcactgccggattggcccaccacaagaaatgacgcggcgtggcgttgccgttatagacgcggctggcgatttccagcgccgcccggtcagggcgcagggtgaaacctgtcatcacctgtaaaccatgcatcggctccgtttcgcctacccacaccgtctgtgcgccgtcttcatgggcttcgagggtgaaatcaacgggcataaaggtggtcgggcgatggtgttgcggccagttaaactcaatcccgccggagatccacggtcccagcagccccaccagcgcaggtttaatgacttcattgtgatagacaaaatcgcgctgtttcactttatcccatgcgcgatgcacccgaccgcccaattccggcaggatcatcactttgatgtagtcgttttccagccacaccgcctgccaggatttcagggttttctgctcgctcagcgtatcggtcacgccgtagggataaaccgcgccggacgatccctgataaacgcgattttccaggaacatgggatgtatatcctgcggcccggtttcataggtcgggatctcaacgcgctcttgccacacttttactggagtcatggtgccctcaatattaacaagacatactgaattaaaagatttgtggcagtgtattgaacaatctggcaatgttttcgcggaataatcacgcaattaactaaacaaggtttagtgaagatgagagcctgcattaacaatcaacagattcgccaccataacaaatgcgtgattctggaactgctgtaccggcaaaagcgcgccaataaatcaacgctggcccggctggcgcaaatttcgattccggcagtcagtaatattttgcaggaactggaaagcgaaaaacgggtggtgaatatcgacgatgaaagccagacgcgcgggcatagtagcggtacatggctgattgcgccggaaggtgactggacgctgtgtctgaacgtgacgcccaccagtattgagtgtcaggttgctaatgcttgtttaagtccgaaaggtgaatttgagtatttacagattgatgcaccgacgccgcaggcactgctgtccgaaatcgaaaaatgctggcatcgccaccgtaaattgtggccggaccgcaccatcaatctggcgctggcaatccacggtcaggttgatccagtgactggagtgtcgcaaaccatgccgcaagcgccgtggacaacgccggttgaggtgaagtatctgctggaagagaagctgggcattcgggtgatggtcgataatgactgcgtgatgctggcgctggcggaaaaatggcaaaataattcgcaggaacgggatttctgcgtgatcaacgttgattacggcattggctcgtcgttcgtgattaacgagcaaatttatcgcggcagtttgtatggtagcggacagattggtcacaccatcgttaatccggatggcgtcgtctgcgactgtggacgttacggctgcctggaaaccgtcgcctcgttaagtgcattaaaaaaacaggcgcgggtatggctaaaatcacaaccggttaatactcagcttgatcctgaaaaactgactacagcgcagttaatcgctgcctggcaaagtggagaaccgtggatcaccagctgggttgatcgctctgccaatgccattggtttgagtctgtataacttcctcaacatcctcaatattaatcagatttggttgtacggtcgcagttgtgcctttggtgagcactggcttaatactattattcgccagacaggatttaacccgttcgaccgcgacgaaggaccgagcgtgaaagcgacgcaaattggcttcgggcaattaagccgcgcacaacaggtgctgggaattggctatttgtatgttgagacgcagttacgacagatttgatggcgcgataacgtagaaaggcttcccgaaggaagcctttttcaacagattaaccgtttcgcttatgcgtaaaccgggtaacgtgcgcagatgtcgagaactttacctttgatgcgctcgataacggcttcatcattgatgctgtccagcacgtcacacatccagccagccagttctttcgcttctacttctttgaagccgcgacgcgtaattgccggagtacccacgcgaataccggaggtcacaaacgggctcttcggatcgttcggtacgctgtttttgttgacggtgatgttagcacggcccagagcggcgtctgcttctttaccggtcaggtttttatcgaccagatcaaccaggaacagatggttatcagtaccgccggaaaccactttgtagccgcgttccaggaacacttctaccatcgctttagcgtttttagcgacctgctgctggtaagttttgaactcaggctccatcgcttctttcagagcaaccgctttaccggcgattacgtgcatcaacggaccgccctgaccaccagggaaaacggcagagttcagttttttgtacagctcttcgctaccacctttcgccaggatcagaccgccgcgcggacccgccagggttttgtgagtggtggtagtaacaacgtgagcatgaggaaccgggttcgggtagacgccagcagcaaccaggcccgcaacgtgcgccatatcaacgaacaggtaagcgccgatgctgtcagcgatttcacgcattttcgcccagtccaccacgccggaatatgcagagaagccaccgataatcattttcggtttgtgttctttggcttgtttttccagatcggcgtagtcgatatgaccggtagcatcaataccgtaaggaacaatgttgtacagtttaccggagaagttaaccggagaaccgtgagtcaggtgaccgccatgcgccaggttcatacccagaacggtatcacctggttccagcagcgcggtgtagaccgcaaagttagcctgggagccggagtgcggctgtacgttagcgtagtcagcgccgaacagttctttcgcacgatcgatcgccagttgttcaacgatatcaacatactcgcaaccaccgtagtagcgtttgcccggataaccttcagcatatttgttggtcagctgagaaccctgcgcctgcattacgcgcgggctggtgtagttttcggaggcgatcagttcgatgtgctcttcctgacgtactttttcctgctccatagcctgccacagttcggcatcataatcggcaatgttcatttcacgctttaacatccgcatctcctgactcagctaacaataaaatttttggcctttataggcggtcctgttggacaacggcgaacagtataaccgaatcattgtgcgataacaggtcttgacaaaggaatttacgcaaacgattaccttcaggctacgcaaggctttggagaataaagagcttgcaaccggaaacggatttcttttcaggtttgtgatgcaaatttttcacttcatcacattctttctgaaaaacaccaaagaaccatttacattgcagggctattttttataagatgcatttgagatacatcaattaagatgcaaaaaaaggaagaccatatgcttgacgctcaaaccatcgctacagtaaaagccaccatccctttactggtggaaacggggccaaagttaaccgcccatttctacgaccgtatgtttactcataacccagaactcaaagaaatttttaacatgagtaaccagcgtaatggcgatcaacgtgaagccctgtttaacgctattgccgcctacgccagtaatattgaaaacctgcctgcgctgctgccagcggtagaaaaaatcgcgcagaagcacaccagtttccagatcaaaccggaacagtacaacatcgtcggtgaacacctgttggcaacgctggacgaaatgttcagcccggggcaggaagtactggacgcgtggggtaaagcctatggtgtactggctaatgtatttatcaatcgcgaggcggaaatctataacgaaaacgccagcaaagccggtggctgggaaggtactcgcgatttccgcattgtggctaaaacacctcgcagcgcgcttatcaccagcttcgaactggagccggtcgacggtggcgcagtggcagaataccgtccggggcaatatctcggcgtctggctgaagccggaaggtttcccgcatcaggaaattcgtcagtactctttgactcgcaaaccggatggcaaaggctatcgtattgcggtgaaacgcgaagagggtgggcaggtatccaactggttgcacaatcacgccaatgttggcgatgtcgtgaaactggtcgctccggcaggtgatttctttatggctgtcgcagatgacacaccagtgacgttaatctctgccggtgttggtcaaacgccaatgctggcaatgctcgacacgctggcaaaagcaggccacacagcacaagtgaactggttccatgcggcagaaaatggcgatgttcacgcctttgccgatgaagttaaggaactggggcagtcactgccgcgctttaccgcgcacacctggtatcgtcagccgagcgaagccgatcgcgctaaaggtcagtttgatagcgaaggtctgatggatttgagcaaactggaaggtgcgttcagcgatccgacaatgcagttctatctctgcggcccggttggcttcatgcagtttgccgcgaaacagttagtggatctgggcgtgaagcaggaaaacattcattacgaatgctttggcccgcataaggtgctgtgatttgatgttgccggatggaaacatccggcaacccttgacgcggtttaaattgccgcgtcgtcctcttcaccggtacggatgcgaatgacccgtgccacgtcaaagacgaagattttaccgtcaccgattttgccggtttgcgccgtgcgaataatggtatcgacacaggtatcgacaatgtcgtccggtacgacaatctcaattttcactttcggcagaaaatccaccatatactccgcgccgcggnacagctcggtatggcctttctggcggccaaaacctttcacctcagtgaccgtcatgccggtaatgccgacttcagccagtgcttcgcggacatcgtccagcttgaagggtttaataatcgcatcaatctttttcatgctattccttgaaaaggtcgcctgtcttttgatctgctaaacgtaacacataacgccaattcattccttgaaatcgtttgcatccagctcgtgtcgggaaagcagtttataaaattctgtccggttgcgccccgccattctcgccgcgtgggtgacgttgcctttggtaatttgcagcagcttacgcaaatagttgagttcaaactgattacgtgcctcaacaaaggttggcagcgccgtattttcaccctccagcgcctgctctactaatgcatcgctaatcaccggagatgaggtcagcgccacgcactgttcaatcacgttgaccaactggcgcacattacccggccagctcgcggtcatcaggcgtttcatcgcatcggtggaaaacgcgcggacaaacggtttatgtcgctctgccgcctggcgcaacaggtgatttgccagtagcggaatgtcttctgtgcgctccgccagtgccggaattttcaggctgacaacgttgaggcggtaatagagatcttcgcggaattccccgcgcgccatcgcttttggcagatcacggtgagtggcagaaataatccgcacattgatatcaatatcgcggttactgcccagcgggcgcactttacgctcctgcaacacgcgcaacagtttgacctgcaacggcgcaggcatatcgccaatctcatcgagaaatagcgttccgccttccgccgcctggaataaaccttcgcgattgctgacagcgccagtaaacgcgccacgcgcatgaccaaacagctccgactccagcaattgctcaggcaatgcaccacagttaatagcaataaatggtttgctattgcgcgggctggcgttgtggatagcctgggcgaaaatctctttcccggtgccgctctggccattaatcaaaacgctgacgtctgattgcgccaccagccgcgcctgttccagcaaacgcagcatcagcgggctgcgggtgacaatcgcctcgcgccagcgttcgtcggtggctggcgcggattgttccagcgcatcatcaattgcctgatatagcgcgtctttatcaacaggcttggtgaggaaactaaaaacgccctgctgtgttgcagcaacggcatcgggaatagaaccatgcgcggtaagaataattaccggcattcccggctgcactttctggatttcagcaaacagctgcataccgtccatttcatccatccgcaggtcgctgatgactaaatctactttttcgcgattcagtacccgtaatccttcagcgccactttccgccgtgaccacgctgtagccttcgctggtcaggcgcaggccaagcagtttcagcaatcccggatcgtcatcgaccaataataaatgcgcaggtttatggctcatcaggagtgacctcatgggtggatggcgcgggcttttcactctcgtgtggcgtatccggcgagaaatttccagccggtttgcgggtcgagagctggcgttcaatatcagtcaggttttccagcttgcgggtggtgagttccagttgctgctgtagaacgtgatgttgctggcgcaatgtatccagctcgctgtcgctggactgctggagtttactgtagcgttggcgctcttccgccagttgcagttgcagcgcctgaccgtcgcgccagagttgatacagtgggcgaacctgtgccgggatctcggtacttaacgcttcaatacgcgcgaccagctggcggcgctcatatggcgtaattttggcgtcggcgagcaaaatcccttgtttaaaggtattttgccagctgccgtcgtcatattggcgagcttgctgacgcgactgcgcaggcattaaacgatcagcacaatccatcgcccgcagccagtaaagcggattggtttcggttgatttaccttgcagcgcccagatgtcgctacattcagtagaaagatagtcagccagttgataaaccggaattttttcttctgctggcgtatcaatggctggcttattgtgattctgcacgcaacctagcaatgccagacatggcagccctgccagccacagccgtcggggcaataatcgttgaaaaatgtgtcgcatattcaccagacttaaagcctatcccagtgggcgtaattgttgcagacagtttggacatggacagcgcggagaaaccggagcgtacatgtcgtacgtgaggatttcgagcactgcccggggccgaactgacaaataaaatagcctgatgggataggctgttagcattatttcgtgtttttcgacgacggtaattcaatgcggaaacaaacgtcttgcccgctctcgtcgaccagatacagttccccttgcatacggcgaatacaatccctggcaatgcttaatcccagaccgctgcccttcaccgccccttttcgctggtggcttccctgaaaaaagggttcgaagatcatggcgcgttcctcttgcggaatgggcgtgcctgtattgatgacatcaatataaacccgcgcaccatgtaaactgctgcgaaggcaaatgttaccggattcagccccgtagtgcaccgcattggagtaaagattatccagtacgctcatcagcagcattggctccgccaggcaagctgttgctttgagatcgacgtcggtatgcatcattttagcccgtgcgggcaggctatgagcagaaactactgtctccaccagcggtgctaactcaacattatctagttccaccgcactgtccgcctgtttacggttgtaatcaagcagttgttcgatcagtttttgcaaattgcggctgctgctatcaagaatgctcaccacctctttttgctctggcgtaagcggcccgacaacctgatcagccagtaattcagtgccctcgcgcatactcgccagtggcgtttttaattcatgagataaatgtcttaaaaattgatggcgttgggattccagccatgacaggcgctcacttaaccaaagaatacgttgcccaaccgagcgtaactcgctcggtccactgaacgaaacgctattgcccagagaacgcccttcccccaaccgattgatcatccgttcaatatttttcaccggcccgataatcatccgcgtgaaaagcagtaccattaccagactcaccagaaatagcaccagcgattgccaaccaaaatattgcccacgttcggcgatttcacgctgaagttgctgcccacgagagaacactactgtgcgcgtggcctgtaccatttcggtattggcactggcaaaggcttccagacgcgcggcagcagcagcatcgggaccactgttgttgcactgaagttgggccagattgttcaagtcctgacgcaatgcctggtaaagtttatcgtctggcagtacgcctgcgtgggcatcgagcatttcgctgtaacgcttgcgctggctttgataaaccttcgcaagcgtagggtcatccagcacgcaatactgacggtagctacgctccatctccagcgccgcgttggtcattgcttcgctgcgccgggcatcgataagcgtggtgcggttgaccagcgccgcctggtcgctaagcgcattcaggctttgccaggcttgccatgccagcaccaacaggggcagcagaatcagcaaaaatgccagcattaccagttgtcgtaatgagcggggaaaaacgggccagcgtttcaaggtgttactctcgtcagacgcgaatagcctgatgctaaccgaggggaagttcagatacaacaaagccgggaattacccggctttgttatggaataaggcggtgcctaactcgacgtttcgcccgatggttgatatagctacgctgatatcagaagttggacggcaggcaccttgttgtgcgtcattcgaattttatgtagcacgtccctaaggggctgacataagtcggtgaatgagccactgattactattatgcagtaactgtgccaataaagaaaatagtttggtaacgtactgattatacgttgctttgaggggtttatggcttccccgctatttgaatgtaaatcagccactgtgtcgctaaaaagagacaacttaagaaaaacttattagattacaataaaatcaatcatttaagtgtcgccagaaagcgacacggtaaaccacccattgtcgtgatttacagacacaaaaaagctcccgaagttgggagcttataatagcggttgtatttaatgccggatgcggcgtgaatgcctcatccgggctgcaaaaccaatgagtttgacggcttaccccaactgcttacgtgcattgcggaaaatgcgcatccatgggccatcctcgccccagttttcaggatgccaggagttgctgacagtacggaaaacacgttccgggtgcggcatcataatggtgactcgaccgctttcagtcgtgaccgccgtaataccgttcggagaaccgttcgggttagccgggtaggtttcagtgactttgccgaagttatcgacatagcgcagtgccaccagccctttgctttccagtgccgccagatgcgccncatcacgcacttccacgcgcccttcaccatgagagacagcaatcggcatttgcgagcccaccatcccctgcaacagcagcgacgggctttgggtcacttcaaccaagctgaaacgcgcttcaaagcgatcggaggtattgcgcacaaaacgtggccacaactcactacctgggatcagttcacgcagattagacatcatctggcaaccgttacatacccccagcgccagcgtttgcggacggtggaagaaggttgcaaactcatcgcgtacacggtcattgaacaggatagacttcgcccaaccttcaccggcacccagcacatcaccgtaggagaaaccaccgcacgcgaccagggcgtggaaatcctccaggcccgtgcgtccagccagcaggtcgctcatatgcacgtcgatagcatcgaagcctgcacggtggaaagctgccgccatttcaacatgcgagttcacgccctgctcacgcagcacagcaactttcggacgtgcgccagtggcaatatacggtgctgccacatcttcgttgatatcaaacgacagtttcacattcaggcccggatcggcgtcgtttgatttcgcctgatgctcctgatcggcacactccgggttgtcacgcaggcgctgcatctgccaggtagtttctgcccaccagacacgcaacgtagtgcggctttcgctgaatacagtctgcccgttggcggtaatcacaaaacggtcaccggaaaccgcctgcccaacataatggacgcaatcagcaagcccatgctgtgccagtacggactcgaccgcttcacggtcagcggcacgaacctgaatgaccgcacccagttcttcgttaaacaacgccgccaggcgatcgtcacccagagtggcgatatccgcgtcaatgccgcaatgaccagcaaaggccatttccgccagcgttaccagcagaccgccatcagagcggtcgtgatacgccagcaacttacgctgtgcaaccagcgcctgaatcgcgtcatagaagcctttcagttgcgcgacatcgcgtacatctgccggtttgtcgccaagctgacgataaacctgcgccagcgccgttgcgcccagcgcgttattgcctttgcccaaatcaatcagcagcagtgcgttatcttcggtagaaagctgcggcgtgatggtgtgacgtacatcttccacgcgggcaaatgcagaaatcaccagcgacagcggcgacgtcatttcgcgctcttcgttaccttcctgccagcgggttttcatcgacatagagtctttacccaccgggatcgtcaggcccagcgccggacaaagctcttcgcccacggctttaacggcttcatacaggcccgcatcttcaccagggtggcctgccgccgccatccagttggcggaaagtttaatgcgtttgatatcgccaatctgtgttgcggcaatattggttaacgcttcaccgaccgccagacgggcagaggcggcgaaatccagcagcgcaaccggcgcacgctcgccaatcgccatcgcttcaccgtagtagctgtcgaggctggcggtagtgaccgcgcagttagcgaccggcacctgccacggccccaccatctgatcgcgcgccaccatgccggttacgctgcggtcaccgatggtcaccaggaaagttttctccgccacggtcggcagatgcagtacgcgtttcaccgcgtctgcaatggtgatcccttcacggaccagcgcatcgcccttcgctttcagcgtttgtacatcgcgggtcatcttcggcgttttaccaagcaggacgtccagcggcagatcgatcggctgattatcaaaatgacgatcgtgcagagaaagatgcagttcttcggtcgcttcaccaatcaccgcgtagggtgcgcgctcacgcttacacagttcgtcaaacagcggtaattgatcggcagcaaccgccagcacgtagcgttcctgggattcgttacaccagatttccagcgggctcatgcccggttcgtcgcttagaatatcgcgcagttcaaatttaccgccgcgcccgccgtcgctcaccagttccggcatcgcgttagaaagaccgccagcgccgacgtcgtggataaacaggattgggttggcatcaccaagctgccagcaacggtcgatcacttcctggcagcgacgctccatctccgggttgtcgcgctgtacggaagcaaagtcgaggtcggcatcagactgacctgacgccatggaagacgccgctccgccgccaagaccgatgttcattgccgggccgccgagaacgaccagtttcgcaccgacgttgatctcgcctttttgtacgtgatcggcgcgaatgttgccgatcccgcccgccagcatgatcggtttgtgataaccgcgcagctcttcgccgttgtggctgttcactttttcttcataagtacggaagtagccattcagtgccggacgaccaaattcgttgttaaacgccgcgccgcccagcgggccttcggtcatgatgtccagcgcggtgacaatgcgctcaggcttaccgaaatcttcttcccacggctgttcgaagccaggaattcgcaggttggaaacggagaaaccaaccaaacccgctttcggcttcgcgccgcgcccggtggcaccttcatcgcggatttcaccgccggaaccggtcgccgcgcccggccacggagaaatcgccgtcgggtggttgtgagtttcgactttcatcagaatatgcgccggttcctgatggaaatcgtagcggcccgtttcgtggtcagcaaagtagcggcccacttcagaaccttccattacggcggcgttatctttataagcagagagaacgtgatctggcgtggtttcgaaagtatttttgatcatcttgaacagcgatttcggctgctgttcaccgtcgataatccagtcggcattaaaaattttgtggcggcagtgctcagagttcgcctgagcgaacatatacagctcgatgtcgttcgggttacgaccaagctttgtgaaagcatcctgcagatagtcaatttcatcttccgccaganccaggccaagacgcaggttagcgtcgatcagcgcctgacggccctgccccagcaaatcaacgctggtaaccggagtcggttgatggtgggcaaacaactgctctgcatcatctaaagcaaaaaagaccgtttccatcatgcggtcgtgcagttcagcggtaacctgctgccattgttcattggtcagcgtaccggcttctatatagtaagcaacgccgcgctcaaggcggtttacctgttgtagcccgcagttatgagcaatatcggtcgctttcgaagaccagggagagatggtgccaggacgcggggtcaccagcaggagtttgccttgcggggcgtggctggcgagtgccgggccatatttcagcaggcgttcaagttgtgcgtgctcatcatcgtttaacggcgcattgaggtcagcaaaatggacatactcggcgtaaatattgtgaaccgggagcctggcagcctgaaaacgtgccagcagtttgttgattcggaatgccgacagtgcaggcgaaccacgcagaatttccatcataagtctctcgtcttctaagctttcggtgtacccaaggggggaaacgggcgtcattataaagaatctgatgcgctgacgaaaccgtttgcgtggaaataaaatcaccatcgtgaattagcaacgcgtgccgccaatggctgtaataagttgccatctggcgcaggtttacgcaaaatgccgctcatttatgagtaaacctttcactattattacattttttcaagctgggacgcgcacgacacagagaattaactaattgaaaaaattaaagattaattatctgttcatcggcattctggcactgctgctcgcggtcgctctctggccatccattccctggtttggtaaagccgacaaccgtatcgccgccattcaagcgcggggagagttgcgtgtgagcaccattcatactcccctgacgtataacgaaattaacgggaaaccttttggcctggattacgaactggcgaaacagtttgccgattacctcggcgtaaaactgaaagtgaccgtgcggcagaatatcagccagctgtttgacgacctcgataatggtaacgccgacctgctggcggcaggacttgtctataacagtgagcgggtaaaaaattatcagcctggccctacctattattccgtgtcacaacaactggtttataaagtgggtcagtatcgcccacgtacgctgggcaacctgacggcggagcaactcaccgttgcaccgggtcatgtggtggttaacgatctccagaccctgaaagaaacaaaattcccggaattaagctggaaggtagacgacaaaaaaggctctgcggaattaatggaagatgtcatcgaaggaaaactcgattacaccattgctgattctgtcgccatcagcctgtttcagcgcgttcacccggagctcgccgtagcgctcgatatcaccgatgaacaaccggtgacctggtttagcccgttagatggcgataataccctttccgccgccctgctcgacttcttcaacgaaatgaatgaagacggtacgctggcacgcattgaagagaaatacctggggcatggcgatgattttgattacgtcgatacgcgcacatttttacgcgccgtcgatgcggtactgccgcagttaaagcccctgtttgagaaatacgccgaagaaattgactggcgtttgctggccgctattgcttatcaggaatcgcactgggatgcacaggccacttcaccgacgggtgtgcgcggcatgatgatgttaaccaaaaataccgcgcaaagcctcggcattacggatcgtaccgatgccgaacagagcatcagcggtggcgtgcgttatttgcaggatatgatgagtaaagtgccggaaagtgtgccggagaacgagcggatctggtttgccctcgctgcgtacaatatgggctatgcgcatatgctggatgcccgcgccctgacggcaaaaaccaaagggaatcctgacagttgggctgacgtaaaacagcgtctgcctttacttagccagaaaccctattacagcaagctgacttacggctacgctcgtgggcatgaagcctacgcttatgtcgaaaatattcgtaagtatcagattagcctggtgggttatctgcaagagaaagagaagcaggctacagaagcggcgatgcaactggcgcaggattatccggcggtatcgcctacggagttgggcaaagagaaatttccttttctctcgtttctttcccagtcgtcatcaaactatttgacccattctccctctctgctgttttccaggaaagggagtgaagagaaacaaaattaatccgtcgaggattgcgcttttttctgcgctttaatttcctggcggcgcatgcgaaagaagtcactgagcaacgccgcgcactcatccgccagtattccttccgtaatttccactcggtgattcatacccggatgatgcagcacatccattaaagatcccgcagcgccagttttcgcgtcacgcgcaccaaagaccacgcgaccaatgcgactgtggatcatcgctccggcacacattacacatggttcaagcgtgacatacaacgtggcgtcgatcagacgataattttgcatcaccagaccgccctgcctcagggccatgatttctgcatgtgcggtgggatcatgtcgaccaatcggacggttccagccttcgccaataacacgattgttatgcactaataccgcgccgaccggtacttcccgctcatcccaggcacgcttcgccagcgtcattgcatgacgcatccagtattcgtggctaaattcgacttcagacaaaaagaaaactccggttataaaagcgcggcgcattatacacggacgctatgctttactctattccagttgctggagttcaccgcgcggggttactcgccagcgatgctggcaaaagtaaagcagcgggttgtcctgattactgtcgctatagccactgtacagccgcagcggcgtgccgattttgcgctccagttgcgcgaccttttcatgcccgaggcaacgcatcgtcaatacccaaccaccatagccacgctgaatttggctggcgataagattcacccgcggcagccagggtgtatcgaaatagaccgcttcaaccagcggctgtggagaaccggtaatcaaccagatatcagcatcggaacttaacaggtaggtggttaatcgctcctgaaccagcggaaaggcggtaacattgtcacgaaaccagcgtacgaaatcggcctgcaacgcctgtaaacgtgcttcgctgtgaccaaaggtgcatccccacagaagcagactcatcggccagcgtgccgcacgaccttttatcaataacgcaatggctataatcggcaacaacggcaggacaagtaacgcattcagcggttggcgacgcagtaaatagcgcagaaaactgccgaacatatcctgctgatgcaatgttccatctaagtcaaaaaacaccacacgacgctcgtgagttgccaaaccatactcctctggactgaaacatcctgattaattttcgctactacatagcctaacagatagatcatcacttttccggcaacaatcgaccgcatcatggctaactggaatttttaattcatggcaattagcggcaatggaatataaaattcactcgcgtgtgtctcatattgcctgttgtcgccactatttcatcgcgaggaaagatatgaacggcttacttcgtatccgtcagcgttaccaggggcttgcccagagtgataaaaaactggcggattatctgctgctacaacctgatacggcgcgccatttaagctctcagcaactggccaacgaagccggagtcagtcagtccagcgtcgtgaagttcgcgcaaaaactcggctataaaggttttccggcgcttaagttggcgttgagtgaagcgctggcaagccagccggaatcgccctcagtgcccattcataaccaaatccgcggtgatgatccgttacggctggtcggcgaaaaactgattaaagaaaatactgccgctatgtacgcaacgctaaacgttaatagtgaagagaaactgcatgaatgcgtaacaatgttgcgctctgcgcggcggataattctgaccggtattggcgcttcgggtctggtggcgcaaaactttgcctggaagctgatgaagattggcttcaatgctgccgcagtgcgcgatatgcatgcgctactcgctaccgtacaggcgtcgtcccctgacgatctgttattagccatttcttacaccggtgtacgacgcgagttaaacctggcggcagatgagatgctgcgagtgggcggaaaagtgctggcgattaccggctttactcccaatgccctgcaacagcgtgcttctcattgcctgtataccattgccgaagaacaagcgacaaacagtgcttcaatctctgcttgtcacgcgcagggaatgttaacggatttgctgttcattgcgctgattcagcaggatctggaactggcaccagaacgtattcgtcatagtgaagcgctggtgaaaaaactggtctgagtaaagaatgcgcgtataatgcccgcccggtttgtgttgttttgagagtttccttatggcgctgttaatcactaaaaaatgcatcaattgtgatatgtgtgaacccgaatgcccgaatgaggcgatttcaatgggagatcatatctatgagattaacagcgataagtgtaccgaatgcgtagggcactacgagacaccaacctgccagaaggtgtgcccgatccccaatactattgtgaaagatccgcaacatgtcgagacagaagaacagttgtgggataaatttgtgctgatgcaccacgcggataaaatttaatattctactctggaagtagagtattaattattttactgggaagccttaacgcccattatatttatttaattgatgacattagcataataattcactaagttaatttatatagtatctgcccagacacttatttatagttattaaaggcgcgtccgattggttcaccggacgcaccttaagtacgtttccttgtgttataagaacagaaggatcagctgtaaaacagcaatgatgattttgatgacccgtttaatcaggtatcggcaatcagtcattcgtttttccttaaacaaggaatgcagccgttcagattagcccttacatctccccaaaactgaacgtgcgagttattggaatcgagtgctgcactccacaccagagctttgacgacaccactcgtttcaatgggggaattcagtggcatggtgtaaagcacagcaaaattgccaataacgaaaccgattttaatgtacttatcaaaaagcggtcacgttaatcttttcatcaatgtcgatttcttcgtaaaggctcgcgttttttatgtcagagattgcaagttgcttgtacaggtcaacgaaattgatccataatcattttcgttggaatcgtgtgctgcacaaaattaaagttaaaaagtaaaacccccgttccttaccagttcgggggttttactttataaagagaacggtattatttttaactttcaataattaccgtggcacaagcatagtggcgctcatcggccagcgtcacatgcatatttgcaacgcccagcttttccgccngttttaatgcctcgccccacagtcgcagccgtggcttaccaagctcatcgttaaatacttcaaactgattaaacgccagaccattgcggatcccgatgccaaacgcttttgctgcggcttcttttacggcaaagcgtttcgccagaaaacgcaccggctggtggtgcgttttccaaatttcccattcgttatcgcttaatacgcggcgtgccaggcgctcaccggatcgggcgatcactgcttctatgcgagcgatctctacgatatccgtgcctaaacctaatattgccattagccacgcgcttccagcatcaggcgcttcatttctgccaccgcatctttcagtccggtcatcactgcacgaccaataatggcatgaccgatattcagttcgtgcatctcagggatggcggcaatggcttttacgttgtgataggtcagaccgtgtccggcgttaactttcaaaccgagactagcggcaaaggtcgcggctttggcgatacgcgccagctcttgcgcctgttcggcgtcagttttggcatcagcatagcaaccggtgtggatctcgataaacggtgcgccaacctctgccgcagctttgatctgctcttcatcggcgtcgataaacagagaaacctgaatcccggcatccgccagacgtttgcaggcatcgcgcattttgtcacgctgccctgcaacgtccaggccgccttcggttgttacttcctgacgcnnnnctggtaccaggcagcaaaaatgcggcttcgtctcaaccgcgatcgccagcatctcttcggtcaccgccatctccagattcatgcgggtatccagcgtctgacgcaggatgcgcacatcgcggtcagtaatgtggcggcgatcttcacgtaaatgcacggtaatgccgtccgcccccgcctgctcggcaataaacgcggcctgcaccggatccgggtaagcggtannnnncgcgttgcgcagcgtancgatatggtcaatgttgacgcctaacagtaattcagccatgacaatcctcatcattcataatgtgttttcaccgttcgcttaggcataaattgccggaacagttccctgctctttaaaggtttaccgccaagatacggcttaagcgccatgcgggtaaagcgtttcgcggcgcgcagtgtgtctgcgtcaggaaattcccgtgcgtttaacgcttttaactgccttccggtgaacgttttattgtcgataacgacgcttgcgataaaccctttttcttcgcgataacgatacgtcatggtgtcatctaccggctcgccgctacccgcacaatgggtaaaattgacgccataacccagatgcccgagcagtgccagttcaaagcggcgcagcgcgggttctggcgtaccagtgacccctgcaagagactgaatgcagtgcaagtaatcgaaaaagagttcagagaagcgcgtctcgtattccagtacgcgggagagaagttcgttgatgtacagaccgctgtaaagcgtgataccgcttaatggcagcgccagcgagacagcttcagcactgcgcagcgttttgacttcgccacgcccgccaaaacgtagcaagagaggggtgaaaggctgtaatgcacctttcagggtagagcgtttagagcgtgcgcctttggcaaccagacgcacgcgacccgattcctccgtgaagacgtccagcatcaggctggtttcgctccacgggcgactatgcaggacaaatgcgcgctgccagccttccatcggagttactcttaaagatcgtcaacgtaaccgagactgcgcagtgcgcgttcgtcgtcggcccaaccggatttcacttttacccacagctcaaggtgaacaggcgcttcaaacatttcctgcatgtctttacgcgcttcaatcccgatggttttgatcttggcccctttgttgccaatgaccatcttcttctgcccttcacgctcaacgagaatcaaaccgttgatgtcataaccaccgcgttcgttagagacgaaacgttcgatctccacggtcacggagtacggcagttcagcgccgaggaaacgcatcagtttttcgcggatgatttcagacgccataaaacgctgtgagcgatcggtgatgtaatcttccgggaagtgatgagtcgcttcaggtagatgcttacgcacgattgccgcaatagtggcaacattcagcccggtttcggcagagattggcacgatatcgaggaagttcatctggcttgccaggaactgcaggtgcggcagcagatcggctttctcctgcacgttgtccactttgttcaccgcgaggattaccggcgctttgccttcgcgcagtttgttgagcaccatttcgtcgtccggcgtccagcgggtgccttcaacgacaaaaatcaccagctcaacatcgccaatagagctgctcgccgctttgttcatcaggcggttaatagcgcgtttttcttccatatgcaggcccggtgtatcgacgtagatcgcctgatacgcgccttcagtatggatccccacaatgcggtgacgagttgtctgcgccttgcgggangtgatggagattttctgccccagcagtttgttcaacaatgtggatttgccaacattcggacgtccgacgatggcaataaatccgcagtaacttttatcgatgctcattccagctccagttttttcaacgcctgttcggcggcagcctgctcagccttacgacggcttgaacctgtgccaaccaccggttcactcaggccgctgacctggcagtggattgtaaattcctgatcgtgcgcttcgccacggacctgaactaccagataagtcggcagcggcagatgacgaccctgcaaatattcttgcaagcgcgttttcggatctttttgtttatcgcctgggctaatttcgtccagacgagtttgataccagttgaggattaatttctcgacggtttgaatatcactgtcgaggaatacgccaccaattaatgcttcgacggtgtcggcgagaattgactcacgacgaaatccaccgcttttaagttcacctggtcctaaacgtaagcactcgcctaactcaaattcgcgcgccagttccgccagcgtattgccacggaccagcgtggcgcgcatccggctcatatcgccttcatccacacgagggaaanggtgataaagcgcattggcgataacgtagctcagaatagagtcgcctaaaaattctaaacgctcgttatgtttgctgctggcactacgatgagttaatgcctgctgcaacagttcctgatgattaaaagtgtagcccagcttccgttgaagccgattaattacgatggggttcatgcgataccaataaataaatgcgtcaacaattcagcacacgaaacagacctgatatacatggctctgctaactgcttcgctgcagtttcagtttagcggtatatggggaccaacgctgtttcgtgtgccgtggcaacctggaggtgccaaccttaaacttcgggggaatattctatacacaacgacgggggatgtcgttagccacgggagatttatctcataaataattcacgttgtcgccataacggcgacaacgtgaacgaagatgagctattaatggatgccgccaatgcgacttaagcgcacacctgtcggccattcgccttcttgcttatcgaagctcatccagatagccgttgcccgaccgaccagattcgcttcaggcacaaagccccagtaacggctgtccgcgctgttgtcgcggttgtcgcccatcatgaagtattgtcccggaggaacaatccaggttgccagttgttgccctggctgctggtaatacatccccacctgatcctgcgcaatcggcactgtcagaatgcggtgcgtcacatcacccagtgtctctttacgctcggaaagacgaattccattttctttggtttcgtttttcggcacttcaaagaatccgctggtcgcttccccaccattacggcgtgagaaggtctgaacgaaatcgctcggttccacgtttgagtaggtgaccggcagcgcgttttcacacgcctggccggaactgcatcccggttgaatcgtcagctcttttgagaccggatcgtaagtgactttatcgcccggtaaacccaccgcgcgcttgatataatcaagctttggatcttccggatatttaaagaccacgatatcgccgcgtttcggatgaccggtttcgatcagcgttttctggtagataggatctttaatgccataagcaaacttctctaccagaataaaatcaccgattaacagagtcggcatcatcgaacctgacggaatctggaacggttcataaataaacgaacgcacaatcaatacgatagccagtaccggaaaaacagaagcaccggtttccagccagccaggcttcggcgcaacctttttcaacgttgctttatccagtgagtcaccggcagccgcctgcgccgctgcctgacgttcccgccgtttaggtgcgaaaaagaatttatccacgcaccataaaatgcccgtcaccagtgtggcaatcaccagaatcagggcaaacatattcgccatgccaactcctaagggttatttgttgtctttgccgacgtgcagaatggcgaggaacgcttcctgcggcagctcgacgttaccgatctgcttcatgcgtttcttaccttctttctgcttctgcagcagctttttcttacggctgatatcgccgccataacatttagccagtacgtttttacgcagctgtttcacggtggatcgcgcaataatgtgcgtaccaatcgctgcctgaatggcgatatcaaactgctggcgtgggatcagatctttcatcttctccaccaactcgcgaccgcggttttgcgaattatcacggtgggtgatcaacgccagcgcatcaacacgttcaccgttgattaatacgtctacacgtaccatgtcggacgcctggaagcgtttgaagttgtaatccagagacgcataaccacgcgaggtagatttcaggcgatcgaagaagtcgagcaccacttccgccatcgggatctcgtacgtcagcgccacctgattaccgtggtaaaccatattggtctgcacgccgcgtttttctacgcacagcgtaataacgttgccgagatatgcctgcggcagcagcatgtgacactctgcaatcggctcgcgcagttcgtaaatgttatttaccgcaggcagcttggatgggctgtcgacgtagataacttcccttgacgtggtttcaacttcatacactacggtcggcgcagtggtgatcagatccagatcgtattcacgttccagacgctcctggatgatctccatgtgcagcaggccaaggaagccgcagcggaaaccaaagcccagcgcgctggagctttccggctcatagaacagtgaggcatcgttcaggctgagtttacccagcgcgtcacggaaggcttcatagtcgtcggaacttaccgggaacagaccggcgtatacctgcggtttgactttcttaaagccaggcagcgccttttctgccggattacgcgccagcgttaaggtatcgccgactggagcgccgtggatatctttaatcgcacatacgagccagcctacttcgccacatttcagttcagtgcggtcaacctgtttcggcgtgaagatgcccagacggtcggcgttataggtctgcccggtactcatgactttcactttgtcgcccttacgcagggtgccgtttttaatacggataagtgaaacaacgcccaggtagttgtcgaaccatgagtcgataattagtgcctgcaacgggccttccggatcgccttccggcggcggaatgtcgcgcaccagacgttcgagaacgtcctgcacgccaacgccggttttcgctgaacagcgcaccgcgtcagtggcgtcgatgccgacgatatcttcaatttcttccgccacgcgttcaggatcggctgccggcaggtcaatcttgttcagtaccggcaccacttcgagatccatttccatggcggtgtagcagtttgccagggtttgcgcttccacgccctgcccggcgtcgaccaccagcaatgcaccttcacaggcagccagcgaacgggaaacttcataggagaagtctacgtggcccggggtgtcgataaagttaagctgataggtttcgccgtcagacgctttgtagtccagcgtcacgctttgcgctttgatggtaatgccacgctcacgctcaagatccatggaatcgagaacctgcgcctccatttcacggtcagacaggccaccgcagatctggataatacggtcagacagcgtcgatttaccgtggtcaatgtgagctatgatcgaaaagttacgtatattcttcataaagtatgattattgtgccttaatgcccggttaaccaggcttttagaagtcgctgttctgagcttaacgtctgtattaatagaaacgccgcattctacactacaacattgaggcgaggaaatgttcataccgtatggattgtggtatctggaaacgtcctcgcatttgttatgcaaaatgcaacaaagccagtgaaatcactggctcgcgtcttccgaagatgtttcaaatcgcacaaggccaggcggcaatgccacgcttaagatgatcggttgccattctgcccgggcagcaaacttacgcgagtagccacgcgcaatcaggaacccgccaataccgccgaggaccgcaccacataatgctgcgacgtcagaagcaaagagtagctgaaatagcgaagcgatgaggaataatcccaccagcggcgacatataaaccagtaatgcggagctaagcaggctgccttcggcgatccccaattccactttttgccccggcactaacggctcatcacagggtacgacaatggtatgcgtggtttgcgggccaagtttattcaacacgcggctaccgcaaccggcgcgtgaagcgcagctgctgcatgaggctttaacatcacaactgaccagcgcctgcccgttttgccaggagacgacggtagcccactctttgatcattgcgctgccccgaacttaatattctcggcaatgcgtttcgccgtttgcggcggcagttcaccgacaatggtgatttcggcgttatcacgtacgcttgtactgacggttctgcgtccggtgcgcaacatctgatcggtgctcgatggcgtagcgcggttaacgtttaccgagaagctgaataatccgtcggaatagagacgtgattcgataggcatgttgtccatcgtcggtagcggacgtcgactactggaaacttcgctaaaaccctgtggcaaccaggttggcgtccagctgaatttagctttttcacctacaggaacagaaagcaacggcggcaaatttgccttcgccagcgtctgcatactgctgctgatatcctgattgacgttaaaagcaatcacgcgaaattgttccagcgtttcaccatcgcgatcaagaagatcaacccgcatcggtaatttcgattcggtgtccatccacacgatgtagctgtagcgtgtaccatctcgggcaaccacgcgaatgacttcgcaaagacgatcagcaatacgcgtgcgcccgacggagataaagtcgtagtaaggagaaaggcgtttgaaatcggtatagatgagcgatggcagagaatcaacaatgtaatcgccattaagcgtgaacggttcaagtcccggttcaaaatagctgatttcattgccgcgctgtaccacttcccggcgcgggccatccatttgcaacaattgtgcaagaggacggttatcgaggcgtgcatgtcgataacgcagagactcaacaccctgtttattgatgctgatgaatgacagctcgtaattcagtgactgactggccaggttcatctgctgtaataacgccccggacgcgggagtggccgaggcgttagcagagaataacaggctacctgtcactaatgacatggcaaaccaaagttgcttcattactgcgattgcgttcctaaagtttgaattcctggcacctgtacagcggcttgctgggtttgcgcctgctcaaactgaagctgttcagagtggagtcggcgttgcagttcgtaatcctgcaacattgcattaatgcgacgacgctgctgctgttgaccattatttgcggtcgcttcagaaggtactcccaggctaaccgggctggctttacccatcatcggcagtgtattaaataccggcgtttcgggctgctgggacgtttcagattgtccattatagtgctggacgccaacgataactgcaagcgatacgcatgcggctacgcccatttgggtaagctgtgccgcccacggacgtactttctgccagaatggcattttctgccattcatgcggcgcaggctgggcttccgggatcaatgtcgccggttgacgtactggctcttcttcaatggcggccatcacgcgtgaagagatatcgaaatggagcacctcgggagtatcaccccgcattgagtcacggattaagtgatagctttcccaggttttctgcatttctgggttatgagccagttcgttaagcagctcactatccagcgtttcgccatccattaaagcggaaagttgttctttctgcatgcctaatacccttatccagtatcccgctatcgtcaacgcctgataagcggttgaactttgttatcaatagcttccctcgctcggaagatacgtgaacgcaccgtacctaccggacaatccatgatagcggctatctcttcatagctcaggccatccagctcccgcaaggttattgccatgcgtaaatcttccgggagggactcaatagttcggaaaactatctgtctcagttcttctgacaacattaagttctcagggttcgaaatttctttcaacgcgccnccactttcgaagttttcagcttcaatggcatccacatcactggaaggtggacgacgcccctgagcaaccaggtaatttttcgctgtatttacagcaatccgatacagccatgtataaaaagcgctatctccccggaacgaatccagcgcacgataggctttaataaaagcttcttgtaccacatcgggaacatcacccgacggcacatagcgggaaaccagactcgccactttatgctgatagcgcactaccagtaagttaaaggctttctgatctcccttctggacccgttcaaccaggacctggtccgttaactgctcgctcatccgaggtaaagtctccccaaaccaaatttccacgcgctatcgaaacgccactccattagctgcaatttgagcaagcaaagggttagagtgtctcgtttttgtaaagttccgtaacgcatctgtttttgtttgtcatgctgtagacggatcattatctatcattataagtctacagaatctgaacatcgcattatctgtgtagaaatgcccatttaactgcctgaagagtaacccaacggcctttttatttcaccacctaatcctccaccagccagtaacttctctttttctcgccgccctgcgtcagcgtgtttagccactgtaacaaatattaaaatagcaggtgtttattcgcacaacatgatgctatgctgaccaaaccgtgtttagtaaattaaacaaagaaaatgaatactctccttgaacattcatgtgacgtgttgattatcggtagcggcgcagccgggctttcactggcgctacgcctggctgaccagcatcaggtcatcgttctaagtaaaggcccggtaacggaaggttcaacattttatgcccagggcggtattgccgccgtgtttgatgaaactgacagcattgactcgcatgtggaagacacattgattgccggggctggtatttgcgatcgccatgcagttgaatttgtcgccagcaatgcacgatcctgtgtgcaatggctaatcgaccagggggtgttatttgatacccacattcagccgaatggcgaagaaagctaccatctgacccgtgaaggtggacatagtcaccgtcgtattcttcatgccgccgacgcaactggtagagaagtagaaaccacgctggtgagcaaggcgctgaaccatccgaatattcgcgtgctggagcgcagcaacgcggttgatctgattatttctgacaaaattggcctgccgggcacgcgacgggttgttggcgcgtgggtatggaaccgaaataaagaaaaggtggaaacctgccacgcaaaagcggtggtgctggcaaccggcggtgcgtcnaaggtttatcagtacaccaccaatccggatatttcttctggcgatggcattgctatggcgtggcgcgcaggctgccgggttgccaatctcgaatttaatcagttccaccctaccgcgctgtatcacccacaggcacgcaatttcctgttaacggaagcactgcgcggcgaaggcgcttatctcaagcgcccggatggcacgcgttttatgcccgattttgatgtgcgcggcgaactggccccgcgcgatattgtcgcccgcgccattgaccatgaaatgaaacgcctcggcgcagattgtatgttccttgatatcagccataagcccgccgattttattcgccagcattttccgatgatttatgaaaagctgctcgggctggggattgatctcacacaagaaccggtaccgattgtgcctgctgcacattatacctgcggtggtgtaatggttgatgatcatgggcgtacggacgtcgagggcttgtatgccattggcgaggtgagttataccggcttacacggcgctaaccgcatggcctcgaattcattgctggagtgtctggtctatggctggtcggcggcggaagatatcaccagacgtatgccttatgcccacgacatcagtacgttaccgccgtgggatgaaagccgcgttgagaaccctgacgaacgggtaataattcagcataactggcacgagctacgtctgtttatgtgggattacgttggcattgtgcgcacaacgaagcgcctggaacgcgccctgcggcggataaccatgctccaacaagaaatagacgaatattacgcccatttccgcgtctcaaataatttgctggagctgcgtaatctggtacaggttgccgagttgattgttcgctgtgcaatgatgcgtaaagagagtcgggggttgcatttcacgctggattatccggaactgctcacccattccggtccgtcgatcctttctcccggcaatcattacataaacagataaaaagcctgggttagcgccgtatacgcttcggaatagttctggtctggcccacgaatgactaagcgatcgctaaagcattctcccgcctgcggggagaatgccagcagcacccgatgcggcagtcgcgcttcgttttccgccacatccgtccgcaaacgtaaatgccagcccatacttaatgccagctccgtaaaactattaccaatctgctctggcagcaccacgcagaaaaatccctcttcggtaatgcactccgccgcgcaagtaagtaaagtctggtgatcaagtgaggtggtgtagcgcgcctgttcccgctgcggcgtcgcgcactccactccttgctcataatacggcgggttgctgatgattaaatcaaagcgcgcggtctgctgtgttacccactgctgaatatccgccgtatggacgttaattctctctaaccacggggactgggcgacattttcctgcgcctgagtggcagcttcactttccagctcaacggcatcaattatcacgctgtcactggttcgctgcgccagcatcagtgccagcaagccactacccgcaccgatatcaaggcaacgttttaccccagccaccggtgcccatgcgcccagcaatatgccatccgttcccactttcatcgcacagcgatcgtgagcaacaaaaaactgtttaaaagtaaatccattacgacgaagcacggatgtagactgtgacatgaaaataaaaccttgcaggaaaaacggcgatagcaccgggtgagaacaatacccgagaagcgatatccatacaaacagatgaagattgcagccgtaacgtctataatcagcgccccacacagaggtagaacatgactgtaacgactttttccgaacttgaactcgacgaaagcctgctggaagccctccaggataaaggtttcactcgcccgaccgccattcaggctgccgccattccgcctgcgctcgatggccgtgatgtactcggttctgcgccgacaggcaccggtaaaacggcggcgtatctgctgccagcgttgcagcacctgctcgatttcccgcgtaagaaatccggtccgccgcgtattttgatcctcaccccaactcgcgagctggcgatgcaggtggccgatcatgcccgcgaactggcgaaacatacgcatntggatatcgccaccatcaccggcggcgtagcctatatgaaccacgcggaagtgttcagcgaaaatcaggacatcgtggtcgccacgaccggacgtctgctgcaatacataaaagaagagaacttcgattgccgcgcggttgaaacgctgatcntcgacgaagcagaccgtatgctggatatgggcttcgctcaggatatcgaacatattgctggcgaaacgcgctggcgtaaacagaccctgctcttttcggcaacgctggaaggcgatgcgattcaggactttgccgagcgtctgctggaagatccggtggaggtttctgccaatccgtccacccgtgagcgcaaaaaaattcatcagtggtattaccgcgccgatgacctggaacataaaaccgcattgctggtgcatctgttaaaacagccggaagcgacccgctcaattgtgtttgtgcgtaagcgtgagcgtgtgcatgagctggcaaactggctgcgcgaagcgggcatcaacaactgctatctcgaaggtgagatggtacagggcaagcgtaacgaagcgatcaaacgtttgaccgaaggtcgcgtaaacgtactggttgcaaccgatgttnnnnnncgcggtatcgacattcctgacgtcagccacgtctttaacttcgatatgccgcgcagtggcgatacttatttgcaccgtatcggacgtaccgcgcgcgccggtcgtaaaggcaccgcaatttcgctggtagaagcccatgaccatctgctgctgggcaaagttggtcgctatattgaagagccaattaaagctcgcgtaattgatgagttacgcccgaaaacgcgtgcaccaagcgagaagcagaccggcaagccatcgaagaaagtactggcaaaacgcgccgagaagaaaaaagctaaagagaaagagaagccgcgggtgaaaaaacgccatcgcgataccaaaaatattggtaagcgccgtaaaccaagcggaacgggcgtgccaccgcaaacgacagaagagtaatctcaatgccgggtttaagcccggcattatttttatcccggcaaaaaacaatcttcaacacactgaataaaagtgtgcatcgccgggctaaccgcttttccggcatggtgagcgcacattgccgtaatggtctgcgagtgttcgccaaaaggcaattcaattaattctccgctctcaagctctttttccaccgcaaagcggggcaagtaactgacaccgatattcgccgcgacacaacgtttgatactttcaatgcttaacagctcaatggtgttttccaccgtgatccgccgctggcgcagcgtgctctcaaatatctgccggaatacacattgcggttcgttgataataaagctacaggcgttatgtcttcccggctcagtaaaatcgacatctgcaatttgcggtgaagctaccagcaccagcgattgctcacccaattctcgtcggttcagggcatcatcattccctacgcgataaaaaaccccgacatcggcctcatcattcaatagcgcatcacggatcacgtaacagttcagagactgcaacgataaacgcacttttggggcgcgttgccgaaaacgctgcaacacctgcggcattcggtaagagagcaacgtttcgcccgaaacaacgcgtagttccccgtccggatccgactcctttttggcagcctcacgaagggtatccatcactctggtgagttcataaatgtgcggcagcagctttttaccttcgcgagtgaggcacatccgtcggccaattttctcaaataactgtaccgagaactcctgctcaagctgctgaatatgaaaagtcaccgtcgattgtgtacagcacaatttttgcgaagctcgcaaaaaggaaccctcttccaccacggttttaagcgtaataaaacggcgcagatccataaccccaaacctatcgaaaatatcgaatttagaatgtaaaaacattcatttttttaaatattctgtgtcgggtactgtctaccaaaacagaggagataacaagtgacaccgacccttttaagtgctttttggacttacaccctgattaccgccatgacgccaggaccgaacaatattctcgcccttagctcagccacaacgcacggatttcatcagagtacccgcgtgctggcagggatgagtctgggatttttaatcgtcatgttgctgtgtgcgggcatttcgttttcactggctgttatcgacccggcagctgtgcatctgttgagttgggcgggggcggcatatattgtctggctggcgtggaaaatcgctaccagtccaacaaaggaagacgggcttcagacaaaaccaatcagtttttgggccagctttgctttgcagtttgtgaacgtcaaaatcattttgtacggtgttacggcactgtcgacatttgttctgccgcaaacacaggcgttaagctggatagttggcgtcagcgttttgctggcaatgattgggacgtttggtaatgtgtgctgggcgctggcggggcatctgtttcagcgattgtttcgccagtatggtcgccagttaaatatcgtgctggcgctgctgctgatctattgcgcggtacgcattttctattaatgaaaaaaagcggaagaggtcgccctcttccgcttagtaacatgctacttaagccttacaggctttcagtaaaggtacgagcgataacgtcgcgctgctgttccggagtcagagagttaaagcgaactgcataaccggatacacggatggtcagctgcggatatttttccggatgcttaactgcatcttccagagtttcacgacgcagaacgttaacgttcaggtgctgaccaccttcaacgcgaacttctggtttcacttctactggaacttcncggtactcaatgtcacccagtttgcttactgcaaccacttcgtcttctgcataacctgctttcgcaacgatncaacgcgcttcgcctttttcgctgtccagcagccagaaagagttcagcagatcgtcgttagcggctttagtaatctggatacctgtaatcatgtgatgcctccccggcaaaattatttgatttgttcagcctgtcgcggccaattggtaaaaccattgttgcttgagtgtatatatactcctcaaacacccttgaatctttgatttaaatcaataaaaaccacacatcaagtgtggtcgcaaatggattttattgttttacatcaacttatgcgggtgtgaaattttaccaatttacatttttttgcactcgtttaagtctaaaaaatgagcatgattttgttctgtagaaagaagcagttaagctaggcggattgaagattcncaggagagcgagatggctaacgaattaacctggcatgacgtgctggctgaagagaagcagcaaccctattttcttaatacccttcagaccgtcgccagcgagcggcagtccggcgtcactatctatccaccacaaaaagatgtctttaacgcgttccgctttaccgagttgggtgacgttaaagtggtgattctcggccaggatccttatcacggaccgggacaggcgcatgggctggcattttccgttcgccccggaatcgccactcctccgtcactgctgaatatgtataaagagctggaaaatactattccgggcttcacccgccctaatcatggttatcttgaaagctgggcgcgtcagggcgttctgctactcaatactgtgttgacggtacgcgcaggtcaggcgcattcccacgccagcctcggctgggaaaccttcaccgataaagtgatcagcctgattaaccagcatcgcgaaggcgtggtgtttttgttgtggggatcgcatgcgcaaaagaaaggggcgattatagataagcaacgccatcatgtactgaaagcaccgcatccgtcgccgctttcggctcatcgtggattctttggctgcaaccattttgtgctggcaaatcagtggctggaacaacatggcgagacgccgattgactggatgccagtattaccggcagagagtgagtaaatttgcgggaaaatgccggatggcagagttgccacccggctgatttatcaggctttattctgacgccaccattcgccaagaagaacgccggttgcgacagagatattcagcccggcaacgttgccagtaccatcaatcttcacgcgcagatcgttcggatcgcgtgcggcatccggtaacccttcatattcctgacccagcaccagtaccattttcgctggcagactggttttgaacagcggtttaccctgctcgctggaagttgtcactacggtgtaacccgcctgacggaaatcatccagcacgttaacaatgttgtcgccagtaatcggctgaacgtgctctgcgccgccttctgcggtacggatagccgcccccgactccagcagtgccgcatcctgcaccacaacacctttcacgccaaagtgcgcgcannnncgcatcatgccacccaggttatgcgggttanattcgttttccagtgccagaacacaatcctgcgcgcctgcctggcttacccactgctgcacggttgtgccattacgctttttgatcaggaagcaaacgccaccgtgatgttccgtgcctgacgcttttgtcaattccgcttcatctaccacatggnacgctttgcggtttgctgccatccagcgcaaggcttcttnnnnnngcggcgttacactctggataaaccaggcgcgaacaatcgcttccggacggctctggaacagtgcctgacaggcgttttcgccgtagacgcgggtttcttccgcacgctgacgacgcaacacttccggatcaataaaacttttaccactgatgccaccgtgatcggccttttccggcgtctcatcacccggcgcgcgggaaaccgtgcgccacggcgaatcttcccacttgcggtcacggggctgactctgtttgtcatcgcgggcggggcgacggccaccgtcagcacgagattttcctggacgcccgccccctttcccggtacgcgggttgtgggtacgtttatcagaatcatcatcactgcggacatacatcactttgaccttgccgcttttacctttcatttcatcgttcatgcttttctccaccagcgctgcgcgaagcgcgcagattacccgaagtccgcgcggttcgccatgatttcgtaccaaagcctgcgactatcatacctattgaataaaacagattattgtctggaacaatgtccccgataatatgtaacatattagaaacataccggcgttgttgccgataagtctccttactcatcccgaggttagttatgaataccgtttgtacccattgtcaggccatcaatcgcattcccgacgatcggatcgaagatgcggcaaaatgcggacgctgcggtcacgacttgtttgacggagaggtgattaatgcgaccggtgaaacgctcgacaaattgctgaaagatgatctaccagtggtgatcgacttctgggcaccgtggtgcggcccctgccgtaatttcgcaccaatttttgaagatgtcgcgcaagagcgtagcggtaaagtgcgctttgtgaaagtgaataccgaagctgaacgtgaattgagcagtcgctttggaattcgtagtataccgacgatcatgattttcaaaaacggtcaggttgtcgacatgcttaatggcgcagtaccgaaagcgccgttcgatagctggctgaacgaatctctttaatcttaccggggcgcatcttgtgccccgttttctcctctgcgacaatggcgtttttttgacgctctcttatgaccgaaaacgctgttctccagttacgcgccgagcgtattgcgcgcgcaacacgtccttttcttgcccgcggtaatcgcgttcgtcgctgccaacgctgtcttttgccagagaaattatgtctctgttcgacaattaccccagcacaagcaaaaagtcgcttctgtttgctgatgttcgacaccgagccaatgaagcccagtaataccgggcgtctgattgctgatattttgcctgataccgttgcgtttcaatggtcgcgtaccgaaccctcgcaggatttgctggatctggtacaaaacccggattatcagccaatggtggtctttcccgcctcgtatgctgatgagcaacgggaagtgatcttcacaccacctgccggtaagccaccgctgtttatcatgctcgatggtacctggccggaagctcgcaagatgtttcgtaaaagtccgtatctggataatcttcccgtcatttccgtcgatctttcccggctttctgcctatcgcctgcgtgaagcccaggctgaaggccaatattgtactgccgaggtagccatcgcactgttagatatggccggcgataccggggcggcagcagggttaggcgagcacttcacccgctttaaaacgcgctatctggcaggaaaaacgcaacatctgggtagcatcacagcagaacagttagaaagcgtttaaaatcattcggtcacttctgcgggagaccggtatgagtcagcgaggactggaagcactactgcgaccaaaatcgatagcggtaattggcgcgtcgatgaaacccaatcgcgcaggttacctgatgatgcgtaacctgctggcgggaggctttaacggaccggtactcccggtgacgccagcctggaaagcggtgttgggtgtgttggcctggccggatattgccagcttgccctttacacccgaccttgcggttttatgtaccaatgccagccgtaatcttgctcttctggaagagctcggcgagaaaggctgtaaaacctgcattattctttccgccccggcatcgcaacacgaagatctccgcgcctgcgccctgcgccataacatgcgcctgcttggaccaaacagtctgggtttactggctccctggcaaggtctgaatgccagcttttcgcctgtgccgattaaacgcggcaagctggcgtttatttcacagtcggctgccgtctccaacaccatcctcgactgggcgcaacagcgtgagatgggcttttcctactttattgcgctcggcgacagcctagatatcgacgttgatgaattgcttgactatctggcacgcgacagtaaaaccagcgccatcctgctctatctcgaacagttaagcgacgcgcgacgctttgtttcggcggcccgtagtgcctcgcgtaataaaccgattctggtgattaaaagcggacgtagcccggcagcacagcgactgctcaacacgacggcaggaatggatccggcgtgggatgcggcgattcagcgtgccggtttgttgcgggtgcaggatacccacgagctgttttcggcggtggaaaccctcagccatatgcgcccgctgcgtggcgaccggttgatgattatcagcaacggtgctgcgcctgccgcgctggcgctggatgccttatggtcacgcaatggcaagctggcaacgctaagcgaagaaacctgccagaaactgcgcgatgcactgccaggacatgtggcaatctctaacccgctcgatctgcgcgatgacgccagcagcgagcattatgtcaaaacgctggacattctgctccacagccaggattttgatgcgctgatggttattcattcgcccagcgccgctgctcccgcaacagaaatcgcgcaagtattaattgaagcggtaaagcatcatccccgcagcaagtatgtttctctgctgacgaactggtgcggcgagcactcctcgcaagaggcacgacgtttattcagcgaagccgggctgccgacctaccgtaccccggaaggaaccatcactgcttttatgcatatggtggagtaccggcgtaatcagaagcaactacgcgaaacgccggcgttgcccagcaatctgacttccaataccgcaaaagcgcatcttctgttgcaacaggcgattgccgaaggggctacgtcgctcgatacccatgaagttcagcccatcctgcaatcgtatgggatgaacacgctccctacctggattgccagcgatagcaccgaagcggtgcatattgccgaacagattggttatccggtggcgctgaaattgcgttcgccggatattccacataaatcggaagttcagggcgtcatgctgtacctgcgtacagccaatgaagtccagcaagcggcaaacgctattttcgatcgcgtaaaaatgacctggctgcaggcgcgggtccacggcctgttggtgcaaagtatggctaaccgtgctggcgctcaggagttgcgggttgtggttgagcacgatccggtttttgggccgttgatcatgctgggtgaaggcggtgtggagtggcgtcctgaagatcaagccgtcgtcgcactgccgccgctgaatatgaacctggcccgctatctggttattcaggggatcaaaagtaaaaagattcgtgcgcgcagtgcgctacgcccattggatgttgcaggcttgagccagcttctggtgcaggtttccaacttgattgtcgattgcccggaaattcagcgtctggatattcatcctttgctggcttctggcagtgaatttaccgcgctggatgtcactctggatatcgcgccgtttgaaggcgataacgagagtcggctggcagtgcgcccttatccgcatcagctggaagaatgggtagaattgaaaaacggtgaacgctgcttgttccgcccgattttgccagaagatgagccacaacttcagcaattcatttcgcgggtcaccaaagaagatctttattaccgctactttagcgagatcaacgaatttacccatgaagatttagccaacatgacgcagatcgactacgatcgggaaatggcgtttgtagcggtacgacgaattgatcaaacggaagagatcctcggcgtcacgcgtgcgatctccgaccctgataacatcgatgccgaatttgccgtgctggttcgctcggatctcaaagggttaggcttgggtcgacgcttaatggaaaagttgattacctatacgcgagatcacggactacaacgtctgaatggtattacgatgccaaacaatcgtggcatggtggcgctggcccgcaagctcgggtttaacgttgatatccagctcgaagaggggatcgttgggcttacgctaaatcttgcccaacgcgaggaatcatgagtaaggtactggaaatgttgaccacttaatcgggactggtgttattattgcccgcttatgtcgtctgcattgcacagaggacccttcaatgaacagagaagaaatgcactgtgatgttgtcaaaatttaagcgtaataaacatcaacaacaccttgcccaactacccaagatttctcaatcagttgatgatgtcgatttcttttacgctcccgccgacttccgggagacgctgctggaaaaaatagccagcgcgaagcagcgcatttgcattgtcgccctgtatctcgaacaggatgacggtggcaaaggcattctgaacgcgttgtatgaagctaaaaggcagcgtccggaactggatgtgcgggtgctggtcgactggcatcgtgcacaacgtggacgcattggcgctgcggcatctaacactaacgctgactggtactgtcgcatggcgcaggaaaatccgggcgtagatgttccggtttatggcgttccaatcaatacccgtgaagcccttggtgttctgcactttaaaggctttatcatcgacgatagcgtactttatagcggtgccagcctgaacgatgtttacctgcatcagcacgataaatatcgctacgaccgttatcatcttatccgtaaccgtaagatgtcagacattatgtttgaatgggttacacagaatattatgaatggccgcggcgttaatcgtctggatgatgttaatcggccaaaaagcccggaaatcaagaacgatattcgtctgttccgccaggagctgcgtgatgccgcttatcatttccagggcgatgccgacaacgatcagctttccgtaacgccgctagtggggctggggaaatcgagtctgttgaacaagaccattttccatcttatgccttgtgccgagcagaaactaaccatctgtacgccatacttcaacctgccagcaatccttgtgcgcaatattatccagttgctgcgcgaagggaaaaaggtcgaaattattgttggtgataaaaccgcgaacgacttctacattccggaagatgaacctttcaagataattggcgcattgccttatctctatgagatcaatctgcgtcgtttcctgagccgtttgcagtattacgtcaatactgaccagctagtggttcggttatggaaagatgacgacaacacctatcacctaaaagggatgtgggttgatgataagtggatgttgatcaccggtaataacctgaacccgcgcgcctggcgtctggatctggaaaacgccattttgatccacgatccacaactggagcttgcgccgcagcgagagaaagaactggagctgatccgcgagcataccaccatcgttaagcactatcgcgatctgcaaagtattgccgattatccggtgaaggttcgtaaactcatccgccgtttgcgccgtatccgcatcgaccgattaattagccgcatcctgtaatcacaaccccgtcctgtacggggtttgttttttggaggccacgttttgcgtattctttttgtctgttcgctattgttactttctggatgcagccatatggctaacgatagctggagcgggcaggataaagctcaacactttatcgcctcgnnnntgnntnnnnnnnnnngaaatgaatattcacagcatcaggggatgagccgggatcgcagtgccatgtttggtttgatgttctctgtcagtttgggggcgtcaaaagagttttgggatagccgccccgaagggagcggctggagctggaaggatttggcctgggatgtcgccggtgcaagcaccggctataccgtctggcaactgacccgtcactaaagacgcatccccttccctttgcgatgtagcatcaaagaaaccagaaacgccaccacggccatcaaggtcacataccagaagaaggctgtttccattcctattgatttcagcgacaacgctacgtactccgccgaaccaccaaatatagcattagcgaccgcatatgacagaccaacgcntaatgcgcgaacctgtgccgggaacatctcagccttcagtattccantgattgatgtataaaaantcantatcagcagggcacacatcaccagaccaaaagcggcataaggcgaggaaacgttttgcaatgctgagagaataggaacggtaaaaatggctgccagcgaaccgaaacataacattgaggtacggcgaccaatcttatccgacagcgcgccaatgagtggttgaataagcatgaatacaaacaatgcggcagtcataatgccactcgccacgttggcatgcattcccgcagtatttaccagatacttctgcatataagtggtgaaggtatagaaacaaagggagcccgcagcggtaaaaccgagaaccatgatgaatgcacggcgattgcgccataatcctttcagagatccagcttcttttaaagcgcgcgtttcttgttgcgaagtttcatctaactgacgacgtaaccacaacgccacaacagctaacacagctcctaacgcgaaaggaatacgccatccccactctctgagtgcagagtcttccatggtgtgttgtaaaaccacgacaaccagtagggctagcagttgtccgccgatcaacgtcacatactgaaatgatgcgtaaaaacctttgcgcccttcaacggcaacttcactcatataggtggcgctggtgccatattctccgccaacggataatccctgaaataaacgcgcgagaagcaataatgccggagcccacgtaccgattgtttcataaccaggcaaacaggcgattaccagtgagccgaaacacatcatacacaccgatagcagcatcgattttttgcgaccatgtttatcggctatgcggccaaatagccaaccgcctattgggcgcatcaggaatcccgcagcaaaaacacctgctgtttgtagtagttgagtcgtcgtgttcccggaagggaagaagatgtgggcaaagtagagtgaacagaacgagtagacatagaaatcgaaccactcgaccagattacctgaagaggcccccacaatcgcccaaatgcggcgacgagtatcactacttgtcagtttgctgtctgccgttacagtactttcagccatgccattatgtctcctgccgtaatccgatgcttttgtcggtcgcttttgtttatttcttttggcaaagaaaatgttatacatttgttacgtatcattatgcaaccttaaccatgaatttagttagcaggaaaatggttattgaggagcttaaggataaatttctggtaaggaggacacgtatggaagtaggcaagttggggaaaccgtatccgttgctgaatctggcatatgtgggagtataagacgcgcagcgtcgcatcaggcatttttttcaccaacgcaaaaaggccatcctgacggatggcctttcgcttaatttgatgcctggcagttccctactctcgcatggggagaccccacactaccatcggcgctacggcgtttcacttctgagttcggcatggggtcaggtgggaccaccgcgctacggccgctaggcaaattctgttttatcagaccgcttctgcgttctgatttaatctgtatcaggccgaaaatcttctctcatccgccaaaacaccttcggcgttgtaaggttaagcctcacggttcattagtaccggttagctcaacgcatcgctgcgcttacacacccggcctatcaacgtcgtcgtcttcaacgttccttcaggacccttaaagggtcagggagaactcatctcggggcaagtttcgtgcttagatgctttcagcacttatctcttccgcatttagctaccgggcagtgccattggcatgacaacccgaacaccagtgatgcgtccactccggtcctctcgtactaggagcagcccccctcagttctccagcgcccacggcagatagggaccgaactgtctcacgacgttctaaacccagctcgcgtaccactttaaatggcgaacagccatacccttgggacctacttcagccccaggatgtgatgagccgacatcgaggtgccaaacaccgccgtcgatatgaactcttgggcggtatcagcctgttatccccggagtaccttttatccgttgagcgatggcccttccattcagaaccaccggatcactatgacctgctttcgcacctgctcgcgccgtcacgctcgcagtcaagctggcttatgccattgcactaacctcctgatgtccgaccaggattagccaaccttcgtgctcctccgttactctttaggaggagaccgccccagtcaaactacccaccagacactgtccgcaacccggatcacgggtccacgttagaacatcaaacattaaagggtggtatttcaaggtcggctccatgcagactggcgtccacacttcaaagcctcccacctatcctacacatcaaggctcaatgttcagtgtcaagctatagtaaaggttcacggggtctttccgtcttgccgcgggtacactgcatcttcacagcgagttcaatttcactgagtctcgggtggagacagcctggccatcattacgccattcgtgcaggtcggaacttacccgacaaggaatttcgctaccttaggaccgttatagttacggccgccgtttaccggggcttcgatcaagagcttcgcttgcgctgaccccatcaattaaccttccggcaccgggcaggcgtcacaccgtatacgtccactttcgtgtttgcacagtgctgtgtttttaataaacagttgcagccagctggtatcttcgactgatttcagctccatccgcgagggacttcacctacatatcagcgtgccttctcccgaagttacgnnnnccattttgcctagttccttcacccgagttctctcaagcgccttggtattctctacctgaccacctgtgtcggtttggggtacgatttgatgttacctgatgcttagaggcttttcctggaagcagggcatttgttgcttcagcaccgtagtgcctcgtcatcacgcctcagccttgattttccggatttgcctggaaaaccagcctacacgcttaaaccgggacaaccgtcgcccggccaacatagccttctccgtccccccttcgcagtaacaccaagtacaggaatattaacctgtttcccatcgactacgcctttcggcctcgccttaggnnnnnnactcaccctgccccgattaacgttggacaggaacccttggtcttccggcgagcgggcttttcacccgctttatcgttacttatgtcagcattcgcacttctgatacctccagcatncctcacagnacaccttcacaggcttacagaacgctcccctacccaacaacacacagtgtcgctgccgcagcttcggtgcatggtttagccccgttacatcttccgcgcaggccgactcgaccagtgagctattacgctttctttaaatgatggctgcttctaagccaacatcctggctgtctgggccttcccacatcgtttcccacttaaccatgactttgggaccttagctggcggtctgggttgtttccctcttcacgacggacgttagcacccgccgtgtgtctcccgtgataacattctccggtattcgcagtttgcatcgggttggtaagtcgggatgacccccttgccgaaacagtgctctacccccggagatgaattcacgaggcgctacctaaatagctttcggggagaaccagctatctcccggtttgattggcctttcacccccagccacaagtcatccgctaatttttcaacattagtcggttcggtcctccagttagtgttacccaaccttcaacctgcccatggctagatcaccgggtttcgggtctataccctgcaacttaacgcccngttaagactcggtttcccttcggctcccctattcggttaaccttgctacagaatataagtcgctgacccattatacaaaaggtacnnnnnnnnnnnnnnnnnnnnnnnnnnnnnnnnnnnnnnnnnnnnnnntgtacntacacggtttcaggttctttttcactcccctcgccggggttcttttcgcctttccctcacggtactggttcactatcggtcagtcaggagtatttagccttggaggatggtccccccatattcagacaggataccacgtgtcccgccctactcatcgagctcacagnatgtgcatttttgtgtacggggctgtcaccctgtatcgcgnncctnnnnnnnnnnnnnnnnnnnnnnnnnnnnnnnnnnnnnnnnccactaacacacacactgattcaggctctgggctcctccccgttcgctcgccgctactgggggaatctcggttgatttcttttcctcggggtacttagatgtttcagttcccccggttcgcctcattaacctatggattcagttaatgatagtnnnnnnnnnnnnnnnnnnnnnnnnnnnnnnnnnnnnnnnnccattcggaaatcgccggttataacggttcatatcaccttaccgacgcttatcgcagattagcnnnnncctncatcgcctntgactgccagggcatccaccgtgtacgcttagtcgcttaacctcacaacccgaagnnnnnncnntcgattcatcatcgtgttgcgaanntttgagagactcacgaacaactntcgttgttcagtgtttcaattttcnnnnnnnnnnagatttttaaagagcaaatatctcaaacatcacccgaagatgagttttgagatattaaggtcggcgactttcactcacaaaccagcaagtggcgtcccnnaggggattcgaacccctgttaccgcnntgaaagggcggtgtcctgggcctctagacgaaggggacgtatcagtctgcttcgcaagacgccttgcttttcactttctatcagacaatctgtgtgagcactgcaaagtacnnttctttaaggtaaggaggtgatccaaccgcaggttcccctacggttaccttgttacgacttcaccccagtcatgaatcacaaagtggtaagcgccctcccgaaggttaagctacctacttcttttgcaacncactcccatggtgtgacgggcggtgtgtacaaggcccgggaacgtattcaccgtggcattctgatccacgattactagcgattccgacttcatggagtcgagttgcanactccaatccggactacgacgcactttatgaggtccgcttgctctcgcgaggtcgcttctctttgtatgcgccattgtagcacgtgtgtagccctggtcgtaagggccatgatgacttgacgtcatccccaccttcctccagtttatcactggcagtctcctttgagttcccggccggaccgctggcaacaaaggataagggttgcgctcgttgcgggacttaacccaacatttcacaacacgagctgacgacagccatgcagcacctgtctcacggttcccgaaggcannannnnatctctnnnannnnnnnntggatgtcaagaccaggtaaggttcttcgcgttgcatcgaattaaaccacatgctccaccgcttgtgcgggcccccgtcaattcatttgagttttaaccttgcggccgtactccccaggcggtcgacttaacgcnnnnnnnnnnnnnnncacgcctcaagggcacaacctccaagtcgacatcgtttacggcgtggactaccagggtatctaatcctgtttgctccccacgctnnnnncacctgagcgtcagtcttcgtccagggggccgccttcgccaccggtattcctccagatctctannnnatttcaccgctacacttggaattctacccccctctacgagactcaagcttgccagtatcagatgcagttcccaggttgagcccggggatttcacatctgactnnnnnaaaccgcctgcgtgcgctttacgcccagtaattccgattaacgcttgcaccctccgtattaccgcggctgctggcacggagttagccggtgcttcttctgcgggtaacgtcaatgagcaaaggtattannntactcccttcctccccgctgaaagtactttacaaccccgaaggccttcttcatacacgcgggnatggctgcatcaggcttgcgcccattgtgcaatattccccactgctgcctcccgtaggagtctggaccgtgtctcagttccagtgtggctggtcatcctctcagaccagctagggatcgtcgcctaggtgagccgttaccccacctactagctaatcccatctgggcacatccgatggcaagaggcccaaaggtccccctctttggtcttgcgacgttatgcggtattagctaccgtttccagtagttatccctctccatcaggcagtttcccagacattactcacccgtccgccactcgtcagcanagaagcaagcttcttcctgttaccgttcgacttgcatgtgttaggcctgccgccagcgttcaatctgagccatgatcaaactcttcaatttaaaagtttgatgctcaannnnntaaacttcgtaatgaattacgcgttcactcttgagacttggtattcatttttcgtcttgcgacgttaagaatccgtatcttcgagtgcccacacagattgtctgataaattgttaaagagcagtgccgcttcgctttttctcagcggcgcggggtgtgcataatacgccttcccgctacagagtcaagcatttatttttgctttctctgccggaattctcaggagaaccccgctgacccggcggcgtgtttgccgttgttccgtgtcagtggtggcgcattatagggagttattccggcctgacaagcgaaaaatataaaaactttatcgttcgctcatttttcaggcaaaacatcttaaatatagtcttttccgtctaacttatagacaaaaacgagccccgaagggctcgttttatcattactggacggcgacaatccggtcttcattaacttccaggcgaataactttacccggaaccaattcaccagacagtatttgctgtgccaacgggttttcgatctgctgctggatagcacgtttcaaaggacgtgcaccatagactggatcgtaaccgttctcgctcagcagtttcagcgcctcgtcagaaatgtggatttcataaccacgttcttccagacgtttgtacagacgtttcaactgaatctgcgcaatcgaggcaatgtgctgttcgcccagcggatggaagaccaccacttcatcgatacggttaatgaactccggacggaagttatggcttaccacaccgagcaccagctctttcatgtgcgcataatccagttcaccgaagcgttcctgaatcagatcggaaccgaggttagaggtcntaatgacgaccgtattacggaagtcgaccgttctcccttgcccgtcagtcagacgcccatcatccagtacctgcaacagaatgttgaagacatccggatgcgctttttccacttcatccagcaggatgacggaatacggacgacgacgcaccgcttcggtcaggtagccaccttcttcataaccgacatatcccggaggcgcaccaaccagacgagacaccgagtgtttctccataaactcggacatatcgatacggaccatcgcctcgtcgctatcaaacataaagttcgccagcgccttacaaagctctgttttccccacaccagttgggccgaggaacaggaatgaaccaatcgggcgatttggatccgccagccccgcacggctacgacgaatagcgttagataccgcatcaaccgcttcgttctgaccaattacgcgatggtgcagttcttgctccatacgcagcagtttttcgcgctcgctttccatcatgcgagaaaccggaatccccgtccaacgcgccagcacttcagcaatttcggcgtcggtcactttattacgcaacagacgcatagttttgccttcgagctgcgttgcggcttccagttgcttttccagttccgggattttgccgtattgcagttcagacatccgcgccaggtcacccacacggcgagcctgttcaatagcgattttcgcctgttccagttccgctttaatggtctgcgtaccagaaagcgatgccttctctgctttccactcttcttctaactcggagtactgacgttctttgtcgctcagttcttcgttgagcatatccagacgttttttactggcttcatcagactctttcattaacgcctgttgttccagtttgagctggatgatacggcgatcgagtcggtcgagttcttctggttttgagtcaatctgcatacgaatgctggatgctgcttcatcgatcaggtcgatggctttatccggcagctgacggtcagcaatgtagcgatgagacaacgtcgccgctgcaacaattgccgggtcagtaatttgcacatggtggtgcaattcgtaacgttctttcaggccacgcagaatcgcaatggtatcttcaacagaaggctcggcaacaaacactttctggaaacgacgttccagcgcagcatctttttcgatgtactggcgatattcgtcaagcgtcgtggcacctacgcagtgcaattcaccacgcgccagcgccggtttcagcatgtttccggcgtccattgcgccatcggctttacccgcgccgaccatggtatgtaattcgtcgataaacaggatgacgttgccttcctgtttggcaagatcgttaagcacgccttttaaacgttcttcaaactcaccgcgatatttcgccccagccaccagcgcgcccatatccagcgccagtacccggcggcctttcaacccttccggcacttcgccgttgataatacgctgcgccagaccttcaacgatggcagttttaccgacgccgggttcaccaatcagtaccgggttatttttagtacgacgttgcagcacctgaatggtacggcgaatttcttcatcacgaccaatcaccggatcgagtttgccctgttcggctcgttcggtaaggtcgatggtatattttttcaaagcctgacgttggtcttcagcaccttgatcgttcacgctttcacctccacgcatttgttcaatcgcttgagtaatgttggcggtggtcgcccctgctgctttcaggatgtcggccagcgtgccgcgagactcaagtgccgccagaacgaacagttctgacgagataaagttatcaccacgtttttgcgccagcttgtcgcaaagattaagaacgcgcaccagatcctgtgatggctggacatcaccaccagtaccttcaacctgcggtaaacgatttaatgcctgattgatatctgtgcgcaactggccagcatttatgccagcggatgttaataaaggactaaccgaacccccttcctgattcagcagggcgctcattaaatgaagtggttcgataaattggttgtcgtgcccaagtgcaagtgattgggcatcggcaagagcaagctggaatttattagtaagacgatccagacgcataactcctcccataacggatcaaagttgctactggagattaaatgaggtcatccctcaattattcaaggttattgaccagattaatgtgaaaagaaaatcacgcgtaccggatcgtcttgattctttaggttatatcagccaaatgaaacttgccatacgaccggtggtcttgtcgcgacgataagagaagaaagtctcattttccgtatatgtacaacggtcgccgccgaaaatttgctcaacacccacgttcgccagacgctgccgggcaagctgataaatgtccgccagatacttatcaccatgctgaatgaaagctgtactcgcttcggcgtctactgccataaacgcctcgcgaacctccgcccccacttcaaacgcgcgtgggccaattgccggccctaaccaggcgagaatattttctggattatcagcaaaacaggaaactgtctcttccagcacgcctgcgcacagtccacgccagccagcatgagcggcggcgacttccgttcccgctcgattgcaaaacagcacagggaggcagtcggcagtcatcactgcgcaaaccctgccgggcgtattgctataagaggcatctgctcgttttgaggcataaggttcgccagtaagattaagcacatctttgccgtgtacctgctcaagccagaccggtttagaaggcaaattgcccgcagcaaaaagtcgcttgcgattctcctcaacgtgatccgggttatcgccacaatgggcaccgaggttgagcgagtcatacgggggcaagctcacgccgccgatacgagtagagctacaggccgcaacaccttttggcagcggccactgcgggacaatcagcttactcataaccagtccacttcatctttatgctcttcgaaatcggcgcgcatcacctcaatcagctccaccatatcttgtggaataggcgcatgccattccatttcgataccggagatcgggtgataaagacgcagcatggttgcatgaagcgcctggcggtcaaatttacgcagcgtggagataaacgcttccgaagcaccttttggcgggcgcggacggccaccataaaccggatcgcccaccagcggatgagtgatatgggccatatgcacgcggatctggtgcgtacgtccagtttccagacgcaaccgcagacgcgtgtgcacacggaagtgttccatgatgcgatagtgagtcaccgccggtttgcccatcggatgcaccgccatgtgagtacgtttggtcgggtggcggctgattggttcatctactgtaccgccagcggtcatatgaccaattgccaccgcttcatactcacgagtaatttcacgcctttgcaaagattcgactaaacgcgtctgagccggaacggtttttgccacaaccatcaggccagtggtgtctttatccagacgatggacgatgcctgcacgcggtacatcagcaatgggcggatagtaatgaagtaacgcattcagtnccgtgccatccgggttacccgcgccaggatgtaccaccagatcgcgcggtttattaatgacgatgatatcttcatcttcatagacgatatccagcgggatatcctgcggttcaaaacgcgcttcttcttcaatctcagcgttgatggcaacctgctcgccacccaatactttttctttcggcttatcacaaagtttgccgttaaccagcacgcgctggtcgaggatccattcttttattcgcgaacgtgaataatccgggaacatttcggccaaagcctgatctaagcgttgaccgagttggttttcggacaccgttgcagtgagctgtactcgttgtgccatatatactgcttcttcgtttatcgttggggttttacggctttgccgtttaatatagtgtgctattgtagctggtcttaaccgggagcaggaacagagaatctcccgtattacattttgagganagtcaaaacgtcatgacgcgcatgaaatatctggtggcagccgccacactaagcctgtttttggcgggttgctcggggtcaaaggaagaagtacctgataatccgccaaatgaaatttacgcgactgcacaacaaaagctgcaggacggtaactggagacaggcaataacgcaactggaagcgttagataatcgctatccgtttggtccgtattcgcagcaggtgcagctggatctcatctacgcctactataaaaacgccgatttgccgttagcgcaggctgccatcgatcgttttattcgccttaacccgacccatccgaatatcgattatgtcatgtacatgcgtggcctgaccaatatggcgctggatgacagtgcgctgcaagggttctttggcgttgaccgtagcgatnnnnatcctcaacatgcacgagctgcgtttagtgacttttccaaactggtgcgcggctatccaaacagtcagtacaccaccgatgccaccaaacgtctggtattcctgaaagatcgtctggcgaaatatgaatactccgtggccgagtactatacagaacgtggcgcatgggttgccgtcgttaaccgcgtagaaggcatgttgcgcgactacccggatacccaggctacgcgtgatgcgctgccgctgatggaaaatgcataccgtcagatgcagatgaatgcgcaagctgaaaaagtagcgaaaatcatcgccgcaaacagcagcaatacataacagaaacctgaaacacaaaacggcagcccttgagctgccgtttttttattctgtcagttgtgaaactgaagcgatttagtcactatcgatctcatcaaatatggctcgctttgagatattcctcaagtaaaaaaacacctcttcctgcgatttctcacaaaaaagattcgttgacaaaaagtgacaaaattatgagatttccatcacacattttgacatcaggaacggtatgctgaattcaccaagacgggaagacaagaggtaaaatttatgacaatgaacattaccagcaaacaaatggaaattactccggccatccgccaacatgtcgcagaccgtctcgccaaactggaaaaatggcaaacacatctgattaatccacatatcattctgtccaaagagccacaagggtttgttgctgacgccacaatcaatacacctaacggcgttctggttgccagtggtaaacatgaagatatgtacaccgcaattaacgaattgatcaacaagctggaacggcagctcaataaactgcagcacaaaggcgaagcacgtcgtgccgcaacatcggtgaaagacgccaacttcgtcgaagaagttgaagaagagtagtcctttatattgagtgtatcgccaacgcgccttcgggcgcgttttttgttgacagcgtgaaaacagtacgggtactgtactaaagtcacttaaggaaacaaacatgaaacacacaccgtttttcttcgcattcttttttaccttcccctgaatgggaggcgtttcgtcgtgtgaaacagaatgcgaagaagaacaataaggcctcccaaatcggggggcnntttnnnntgataacaaaaaggcaacactatgacatcggaaaacccgttactggcgctgcgagagaaaatcagnnnnctggatgaaaaattattagcattactggcagancggcgcgaactggccgtcgaggtgggaaaagccaaactgctctcgcatcgcccggtacgtgatattgatcgtgaacgcgatttactggaaagattaattacgctcggtaaagcgcaccatctggacgcccattacattactcgcctgttccagctcatcattgaagattccgtattaactcagcaggctttgctccaacaacatctcaataaaattaatccgcactcagcacgcatcgcttttctcggccccaaaggttcttattcccatcttgcggcgcnccagtatgctgcccgtcactttgagcaattcattgaaagtggctgnnnnaaatttgccganatttttaatcaggtggaaaccggccaggccgantatgccgtcgtaccgattgaaaataccagctccggtgccataaatgacgtttacgatctgctgcaacataccagcttgtcgattgttggcgagatgacgttaactatcgaccattgtttgttagtctccggcacgactgatttatccaccatcaatacggtctacagccatccgcagccattccagcaatgcagcaaattccttaatcgttatccgcactggaagattgaatataccgaaagtacgtctgcggcaatggaaaangttgcacaggcaaaatcaccgcatgttgctgcgttaggaagcgaagctggcggcactttgtacggtttgcaggtactggagcggattgaagcgaatcagcgacaaaacttcacccgatttgtggtgttggcgcgtaaagccattaacgtgtctgatcaggttccggcgaaaacgacgttgttaatggcgaccgggcaacaagccggtgcgctggttgaagcgttgctggtactgcgcaaccacaatctgattatgacccgtctggaatcacgcccgattcacggtaatccatgggaagagatgttttatctggatattcaggccaatcttgaatcagcggaaatgcaaaaagcattgaaagagttaggggaaatcacccgttcaatgaaggtattgggctgttaccctagtgagaacgtagtgcctgttgatccaacctgatgaaaaggtgccggatgatgtgaatcatccggcactggattattactggcgattgtcattcgcctgacgcaataacacgcggctttcactctgaaaacgctgtgcgtaatcgccgaaccagtgctccaccttgcggaaactgtcaataaacgcctgcttatcgccctgctccagcaactcaatcgcctcgccgaaacgcttatagtaacgtttgattaacgccagattacgctctgacgacataataatgtcggcataaagctgcggatcctgagcgaacagtcgcccgaccatcgccagctcaaggcggtaaatcggcgaagagagngccagaagttgctcaagctgaacattttcttctgccaggtgcagcccgtaagcaaaagtagcaaagtggcgcagtgcctgaataaacgccatattctgatcgtgctcgacggcgctaatacgatgcaaccgagcgccccagacctgaatttgctccagaaaccattggtatgcttccggtttacgtccatcacaccagaccacaacttgctttgccaggctaccgctgtccggaccgaacattgggtgtaaccccagtaccgggccatcgtgcgccgccagcatggcctgtaatggtccatttttcactgatgccagatcaaccagaatacaatctttcggtaaaggcggtaatttgccaataacttgctcagtaacgtggattggcacactaacaatcaccattccggcatcggcaacaatatcagccgctcgatcccagtcatgttgctccagaatccgcacctgataacccgagagtgtcagcatcttctcgaacagacgtcccatctgaccgccgccgccaacgataactaccgggcgtaacgcaggacaaagcgttttaaatcctttgtcgttttcactggagtaagattcacgcatcacccgacgcaaaacatcctcaatcagatctggcggtacacccagagcttccgcctctgcacgacgcgaggccaacatagatgcctctcgctccggaacataaataggcagtccaaagcggcttttcacctcgcccacttcagcaaccagttccagacgcttcgctaataaattcagcagcgctttatcgacttcatcaatttgatcgcgtaatgcggtcaattcagcaaccataataaacctcttaagccacgcgagccgtcagctgcccgttcagatcctgatgaatttcacgcagcaaggcatcggtcatttcccagctaatgcaggcatcggttacggatacaccgtatttcatttcactgcgcggttgctcggaagactgattgccctcgtggatattactttcgatcatcagaccaataattgagcgattgccatctttgatttgagcaaccacggattctgccaccgcaggctgacggcgataatctttattggaattaccgtggctgcaatctaccatcagagacgggcgcagtcccgcctgttccatctctttttcacattgcgcaacatccgcagggctatagttcggcgctttaccaccgcgcaggatgacatgcccgtccggattcccctgagtttgtagcaacgcaacctgccctgcctggttaatgccaacaaaacggtgcggctgggcggcggcgcgcatagcgttaattgctgttgccagactgccgtcggtgccgtttttaaagccaaccggcatggaaagcccggaggccatttcacggtgagtttgcgattccgttgtacgagcaccaattgctgaccagctaaacagatcgcccaggtattgcgggctattcggatctaacgcttccgtcgccagtggcagtcccatattcaccagctcaagcagcaatttacgcgcgatctgcagcccggcttctacatcaaaagagccatccatatggggatcgttaattaaccctttccagccgacagtggtacggggtttttcaaaatagacgcgcattaccagatagaggctatcgctgacctctgcggcaagggctttaaatcgacgagcatattccagagcagtttccggatcatgaatggaacaagggccacatactaccagcagacgaggatcgcgcccggcgataatatctgaaatggttttacgcgagtcagcaatctgggcttcttgttgcaggcttaatggaaaagcggccttcagttgtgccggagtcattaaaacctgttcgtcggtaatatgtacgttattcagcgcgtctttttgcatgatggcgatcctgtttatgctcgtttgcgatagttgatcctcagcgaggatgacgtaacgataacacataaagtaaagttttcaatccatatttcgtacatttttctttacataagcaatttattcgcgctttcaacccttgattctgtatagataaatttacaccacctttgaaaacaatccgctatgctttgaaaaaggagaaagaaatgatgaaaaagtttatcgcccccttgttggctttactggttagcggatgccagattgatccttatactcacgcgccaaccttgaccagcaccgactggtatgatgttggtatggaagatgcgatatcgggcagcgccataaaagatgacgatgcatttagcgattcacaggcggatcgcggtctataccttaaaggatatgccgaaggacaaaagaaaacttgccagaccgattttacttatgcccgaggactttccggtaaaagctttcctgccagctgcaacaatgttgaaaatgccagccaactgcatgaagtatggcaaaaaggggctgatgaaaatgccagcgcaatacgattaaattaattaaaaccccacaaataaattaaacataagattttactcattatgttttatttctcacaatgatgacgaccgcatgaaataatgatattttaatgagcattctgaaaaaatatcgatgcatttcgagcgaagatggtggggatccctgaatgcgtttttctcaccgactgttcttactgctgattctcctgctgacgggagcaccaatactcgctcaggagccttctgacgttgcgaaaaacgtgcgtatgatggtttccggtattgtcagttacacccgctggcctgcgctatcagggccaccaaagttatgtatcttttcatcttcacgttttagtaccgccctacaagagaatgccgcaacatctttgccttatctgcctgtcatcattcacactcaacaagaggcgatgatttcaggctgcaatggtttttattttggcaacgagtcaccgacattccagatggaattaaccgaacaatatccgtcaaaggcgttattattaattgccgaacaaaataccgagtgcattattggtagcgccttttgtctgatcatccacaataatgacgtcagatttgccgtaaacctggatgccttatcgcgtagcggtgtaaaggtcaacccggatgtcttaatgctcgcacggaagaaaaatgatggataacgataattctcttaataagcgccccacgtttaaaagagcattacgcaacatcagtatgaccagcatatttatcactatgatgctgatctggttgctgctttccgtgacctcggtgctgaccctgaaacagtacgcgcaaaaaaacctggcactgacagcagcaacaatgacttacagtctggaagcagctgtcgtttttgccgatggccctgcagcaactgaaacactggcagcgctgggccagcaagggcaattttcaactgcagaagtacgtgataagcagcaaaatattctggcatcctggcattacacccgtaaggatccaggcgatactttcagcaatttcataagccactggctcttccctgcccccatcattcagccgattcgtcacaatggtgaaaccattggcgaagtacgcttaaccgctcgcgacagttcaatcagccattttatctggttttcgctcgccgtactgaccggttgtattctgctggcatcaggaatcgcaattaccctcacccgccatttgcacaatggcctggtggaagcactgaaaaatatcaccgatgtcgtacatgatgtgcgttccaaccgcaatttttcccgacgagtttcggaagaacgtatcgctgagtttcaccgcttcgctctcgacttcaacagtctgctggatgaaatggaagagtggcagcttcgtttacaggccaaaaatgcgcagcttctacgtaccgcgctacatgacccattaaccgggctggctaaccgcgcagcgtttcgtagcggcatcaatacgttgatgaacaattccgctgcccgaaaaacgtcggcgttactatttcttgatggcgataatttcaaatatatcaatgatacctggggtcatgcgacgggcgatagagtcttgattgaaatcgcaaaacggttagctgaatttggcgggctgcgacataaagcataccgcctgggcggcgatgaattcgctatggtgctctatggtgtacagtcggaatctgaagtgcagcagatatgctcagcactgacacaaatctttaatctcccgtttgatcttcataatggccatcagaccaccatgacattaancattggttacgcaatgaccattgcgcacgcttctgcggaaaaattacaagagctggccgatcacaatatgtatcaggccaaacaccagcgtgccgaaaagctggtgagataacaaggatatatcgatatgataaagcacctggtagcacccctgattttcacctcactaatactgactggctgccagtcccctcagggaaagtttactcctgagcaagtcgccgctatgcaatcttatggatttactgaatccgccggcgactggtcgctgggcttatcagatgccattctgttcgcaaaaaatgactacaaattgctcccggaaagccagcaacagatccaaaccatggcagccaaattggcctcgacagggctaacacatgcccgtatggatggacacaccgataactatggtgaagacagttacaacgaaggcttatcattgaaacgggcgaatgtcgtggccgatgcatgggctatgggtggacaaattccacgcagcaatctcaccacacagggtttaggaaaaaaatatcccatagccagtaacaagaccgcccagggccgcgccgagaaccgccgcgtcgcagtggtgattactaccccttaaaacacgagcaaacagataaaaaaagggccagccaattggccagcccttcttaacaggatgtcgcttaagcgaaatcttagttaagacgctctttgatacgagcagccttaccagtacgctcacgcaggtagtacagtttagctttacgaacagcaccacgacgtttgacagaaatgctgtcaactaccggagagtgagtctggaagacacgctcaacgccttcgccgttggaaattttacgaacagtgaatgcagagtgcagaccgcggttacgaatagcgataaccacgccctcgaatgcctgcagacgttttttggaaccttcaacaacccatactttcacttccacggtatcccccggacggaaggaaggtacgtcctgcttcatctgctcttgttcaagttgcttaataatgttgctcataatttaatctcttatcctgggtaaactgatatctcgggggcttacgccatcccatcatgtttatgttgctgttgtgcgtgttccgttttgaactccgccagcaaccttgcttgctcttcagtcagagccaggttttccagaagttcaggtcttctaagccaggtacggcccagcgactgtttcaaacgccagcgacgtatctcggcatggttgcccgacagtaacactggcggaacttccatcccttctaacacctcaggccgcgtatagtgcgggcaatccagcaatccttcagcaaaggaatcttccgttgccgaggcttcatgtcccagtactcccggaataaaccgggaaacggagtcaatcagcgtcattgctggtaactcaccaccactgagaacgtaatcgccgattgaccattcttcgtcaatttcggtttggatcacgcgctcatctataccttcgtagcgaccgcacaccagaatcaatttttgattcgttgccagttcgctgacgcccgcttgatcaagcttgcgtccctgtggtgaaagataaatcacctttgcgccttcacccgccgcggcttttgctgcatgaatggcgtcccgcaagggttgcaccatcattaacatccccggtccgccgccgtnnnnncgatcgtccacggtacggtgccggtcatgcgtgaaatcgcgaggactccagctctggatgctcagcaggccatttttaactgcccggccagttaccccgtaatcggtaattgcgcggaacatttcaggaaacaggctaattatgccaatccacatagcgccgtcttttaccgtttatccggtggtttaaaaaccaggatcccaatctacttcgattgaacgagtagtgagatcgactttcttgataacctgcccatcgaggaacggtacgagacgttccttgataccaaacgcatctttcaggtttgccttaatgacgagaacgtcattggatccggtttccatcatatcgacgactttaccgagatcgtagccttcagtggttactacctggcagcccatcaggtctttccagtagtagtcaccctcttcaagctgaggcagctgcgatgaatccacgacaatttcacaattcgtcagcaggttcgccgcatcacgatcgtcaacgcctttcagcttgatgatcatgtcctgattgtggtgcttccagctttccagctggacttgctgccactgacccgccttctggataaaccagggctgatagtcaaaaatgctttcggcgtcttcggtggaagaaaacactctgagccacccacgaataccgtaagacgaacccatttttcccaaaacgatgggatcaacaggtgcttgcgcggtgagttgtttgctcatcatgaccaccgtgacagattaagctgctttgtttacttctttgatcagcgcagcaacgcgatcagaaatagttgcgccctggccaacccagtgagcgatgcgatccagatccaggcgagtgccttcttctttttcgctagcgattgggttgaagaaaccaacgcgctcgatgaagcgaccgttgcgtgcattacggctgtcagcgacaacaacctggtagaacggacgctttttagcgccgtgacgtgctaaacgaatagttaccataacatcctcttgtgtgaataaaacaaccggaccccatcgaggaacggagtccggtgtcatattaaaagcccgaaaattttactgatttctggagaaaatgcaatcagcagttaataactctgtcgcataaggtcatttagcgaccaggaaatcccggcggcatcatccccttcatgcttctcatcatcttcgccattccgcccttcttcattttcttcatcatgcgctgcatgtcgtcgaactgtttcagaagacggttaacgtcctgcacctgcataccgcaaccggcagcaatacggcgtttacgcgaacctttgatgatttctggcttagcgcgctctttcatcgtcatcgagttgatgatggcttccatacgcaccagcactttatcgtccatctgtgacttgacgttatccgggatctgccccatgcccggcagtttgcccatcaggctggccatgccgcccatatttttcatctggcgcagttgctcaaggaagtcgttgagatcgaagccgtcaccttttttcagcttgctggctaatttctctgcctgcgcgcggtcaactttgctttcgatatcttcgatcagcgacagtacgtcgcccatgccgagaatacgcgacgcgatgcggtccggatggaacggctccagcgcctcagttttctcgccaacaccgaggaacttgatcggtttgccagtgatgtgacgaatagagagcgccgcaccgccgcgggcatcgccgtccactttggtcaacactacgccggtaagcggtaacgcttcattgaatgcttttgccgtattggccgcatcctgaccggtcatggcgtcaaccacaaacagggtttcaaccgggttaatcgacgcatggacttgtttgatctcgtccatcatcgcttcgtcaacgtgcagacgaccagcggtatccaccagcagcacgtcgtagaatttcagtttggcttctttcagcgccgcgttaacaatatcaaccggcttctgaccaacatcagaagggaagaaatcaacgcccacctgctctgccagcgtctcaagctgtttgattgccgccgggcgatagacgtcagcagaaaccaccagcactttcttcttgtgcttctcgcgcaggaacttaccgagtttaccaacgctggttgttttaccggcaccttgcaggcctgccatcagcacgaccgcaggcggttgcgcagccagattcagggtctggttctcttcgcccatcgccgcaaccagttcgttacggacgattttgacgaactcctgccccggcgtcaggctcttattaacttcatgaccaaccgctttctcttttacgcgattgataaactcacgcactaccggcagagcgacgtccgcctccagcagcgccatgcgcacttcgcgcagcgtatcttttacgttgtcttcagtgaggcgtccacggccactgatattgcgcagcgtgcgcgacaaacgatcggttaaattatcaaacattgtctctcgcctgaggtggaaacggttggccgcaatcgcgacacatcatcagtattttgccgcagtataacatgaaggcgtctttgttgttatgcaacggttggagcagcgttcacctgacgctatactgcttctctttcttattgctcaaactgtcgacatcactatgcccgtttttgctctgctcgcgcttgtcgcctactccgtcagtcttgcgctgattgttcccggtctgctgcaaaaaaacggcggctggcggcgcatggctattatttctgcggtcattgcgctggtctgccacgcaatcgctctggaagcccgcatcctgcccgacggtgatagcggacaaaacctcagcctgctgaacgttggttcattggtcagtttgatgatctgtacggtaatgaccattgtggcttctcgcaatcgtggctggttgctgctacccattgtctatgcctttgcgcttatcaacctggcgctggcaaccttcatgcccaatgaatacatcacccatctggaagctacgcctgggatgctggtgcacattggcttatcgctcttttcctatgccacgctaattatcgccgccctgtacgcgctgcaactggcgtggattgattaccaactgaagaacaagaagctggcgtttaaccaggaaatgccgccattgatgagtatcgagcgtaaaatgttccacatcacgcagattggcgtggtgctgctaacgctcacgctttgcactggcctgttctacatgcacaacttatttagcatggaaaatatcgacaaggctgtgctctctatcgtggcgtggtttgtctatattgtgctgctatggggacattatcatgaaggatggcgtggacgtcgcgtcgtctggtttaacgttgcgggtgcagtcattctgacactggcctacttcggcagccgaattgtccagcagttaatcagctaaacccagaaaaggagtttccccctggaacacatttctactactacgttgatcattattctgatcatcatggtggtcatttcagcctatttttccgggtccgaaaccggaatgatgaccctcaaccgctatcgtctgcgacatatggcgaaacagggtaatcgctcggccaaacgcgtcgaaaaattgctgcgtaagccagaccgcctgataagcctggtgttaatcggcaataacctggtcaatattcttgcctccgcgctcggcactattgttgggatgcgtttgtacggcgatgcgggcgtggcaattgcgactggtgtgctgacttttgtcgtactggtttttgctgaggtattgccgaaaaccattgccgcgctgtacccggaaaaagtcgcttatccgagtagttttctgctggctcccctgcaaattttgatgatgccgctggtctggttgctgaatgctatcacccgtatgctgatgcgcatgatgggtatcaaaaccgatatcgtggttagcggctctttgagcaaagaagagttgcgcactatcgtgcacgaatcgcgctcacaaatttcccgtcgcaatcaggatatgctgctgtcggtgctcgatctggaaaaaatgaccgttgatgacatcatggtgccgcgtagtgaaattatcggtattgatatcaacgatgactggaaatctattctgcgccaactctcccactcacctcacgggcgcatcgtgctctaccgtgattcgctggacgacgccatcagtatgctgcgagtacgtgaagcttggcggttgatgtcggagaaaaaagagttcaccaaagaaaccatgctgcgcgccgcggacganatctattttgtgccggaaggtacgccgctcagcacgcagttggtgaagtttcagcgcaacaaaaagaaagtcggcctggtcgtcaacgagtatggagacattcaggggctggtgacggttgaagatattctggaagagattgtcggcgatttcactacgtcgatgtcgccaacacttgccgaagaagtcacgccgcaaaacgacggttcggtgattattgatggcactgccaacgtgcgggaaatcaacaaagcctttaactggcatctaccggaagatgatgcccgcacggttaatggcgtcattcttgaggcactggaagagatccctgtcgtaggcacccgcgtgcgtattggcgagtacgatatcgatattctcgacgtacaggacaatatgattaagcaggtaaaagtttttcctgtgaaaccgctgcgcgagagtgtggcggagtaacgaaaacggcccggcattcgcatgcagggccgtgaattattacgaaaacagaaattacgcttttgctttcgctacagttaccatcgccgcacgaatcgtacgaccattcagcgtataacccttctgcataatgcccagtacgttacctggcgcaacgtcatcagattccaccattgcgatagcctgatgcacattcgggtccagcggcacgttagtttcggcgatcacttcaacaccaaacttacgcacaacatccagcatcgacttcagcgtcagctcaatgccttcaaccatcgcagacatatccgggttagctttatcagccacttccagcgcacgatccaggctatcaatcaccggcagcaattcgttgatgaatttctccagcgcgaatttgtgggctttttcaatatccagttcagtacgacgacgcaggttttccatttcggcttttacacgcaaaatgccgtcacgttcacgggtctgggcttcagccagctgagcttcgagattcgcaattttttcatcgcgcggatccacctgctcagcagaagcttctggctcaactgcctcaatctcttcgtgctgatccatgataatttcttccggggcttgcccctcaggcgttttctgttctttactactcatgaatttctccgcgtttttttcgcattcatctcgctaacttcgcttattatggggatcagtttcagggtttcaagggaagcactcacattgtcatcaatcttcgcaacaaggacctcggaaaaatgaataatcatttcaagtgtattggcattgtgggacacccacggcaccctactgcactgacaacacatgaaatgctctaccgctggctgtgcacaaaaggttacgaggtcatcgttgagcaacaaatcgctcacgaactgcaactgaagaatgtgaaaactggcacgctcgcggagattgggcaactggctgatctcgcggtagtcgttggtggcgacggtaatatgctgggcgcggcgcgcacgctcgcccgttacgatattaaagttattggaatcaaccgtggcaacctgggtttcctgactgaccttgaccccgataacgcccagcaacaattagccgatgtgctggaaggtcactacatcagcgagaaacgttttttgctggaagcgcaagtctgtcagcaagattgccaaaagcgcatcagcaccgcgataaatgaagtggtacttcatccaggcaaagtggcgcatatgatagagttcgaagtgtatatcgacgagatctttgcgttttctcagcgatctgatgggctaattatttcgacgccaacaggctccaccgcctattccctctctgcgggcggtcctattctgaccccctctctggatgcgattaccctggtgcccatgttcccgcatacgttgtcagcacgaccactggtcataaacagcagcagcacgatccgtctgcgtttttcgcatcgccgtaacgacctggaaatcagttgcgacagccagatagcactaccgattcaggaaggtgaagatgtcctgattcgtcgctgtgattaccatctgaatctgattcatccgaaagattacagttatttcaacacattaagcaccaagctcggctggtcaaaaaaattattctaattttacgccagcctctttactgtatataaaaccagtttatactgtacacaataacagtaatggtttttcatacaggaaaacgactatgttggcacaactgaccatcagcaactttgctatcgttcgtgagcttgagattgattttcatagcggcatgaccgtaataactggcgaaaccggtgcgggtaaatctattgcaatagatgccctcggtctttgtctcggtggtcgcgctgaagccgacatggtgcgtaccggcgctgctcgcgctgacctgtgcgcccgtttttctctgaaagatacgccagcggccctgcgctggctggaagaaaaccagcttgaagacgggcatgaatgtttgcttcgtcgcgtgatcagcagcgatggtcgctcccgtggtttcatcaacggtacagctgttcctctgtcacaactgcgcgaactgggtcagttgctgattcagatccatggtcagcacgctcatcagttactcaccaaacccgagcaccaaaaattcctgcttgatggctatgccaatgaaacctctctactccaggaaatgaccgcacgttatcagttgtggcatcaaagctgccgtgacctcgcgcatcatcaacagttaagtcaggaacgcgctgcccgtgcggaactgctgcaataccaattaaaagaacttaacgaatttaatccgcagcccggagagtttgagcaaatcgacgaagagtacaaacgtctggcgaacagcggtcaattgctgaccaccagccagaatgcattggcattaatggccgacggtgaagacgcaaacctgcaaagtcagctttacacggctaaacaactggtgagcgaattgattggcatggacagcaaactgtccggcgtacttgatatgctggaagaagctaccatccagattgttgaagccagcgacgaactgcgccactactgcgatcgtctggatctcgatcccaaccgactgtttgaacttgaacagcgcatctcaaaacagatttcgctggcacgtaaacatcacgtcagccctgagacattgccacagtattaccagtcgctactggaagaacagcagcaactggacgatcaggccgactcacaagaaacgctcgcgctggcggtaacgaaacatcatcagcaggcactggaaacggcgcgcgcattacaccagcaacgccagcattatgcagaagaacttgcacagctgatcaccgacagtatgcatgcgctctcaatgccgcatgggcagtttacgattgatgtcaaatttgacgagcatcacctgggcgctgnnnncgccgatcgtattgagtttcgggtaaccaccaacccaggtcagccaatgcagcctattgccaaagtcgcatccggtggtgaattgtcccgcatcgcattggcaattcaggtcatcacggcgcgtaaaatggaaaccccggcactgatttttgatgaagtggatgtagggattagcggtccaacagcggcagttgtcggcaaactgctgcgtcaactcggcgaatcaactcaggtgatgtgtgttacccacctgccacaagtcgcgggatgtggtcatcaacactattttgtcagcaaagaaaccgatggtgcgatgacagaaacgcatatgcaatccctgaataaaaaaacgcggttacaagagctggnnnncctgcttggtggcagtgaagtcacacgtaacacactggcgaatgcgaaagaactgcttgcggcgtaaactttttttctgcttcacggtcagagtaaacagcaaaacgccgtaagaccggaaagcaaaaggttttaaagtgatgaaaggtctattatcatcggcatattacagatgagccacgtactgctcgggcccgaaaaggaatcaaatcactatgcgctgtaaaacgctgactgctgcagcagcagtactattgatgttgaccgcaggctgttccactctggagcgagtggtttaccgtcctgacatcaaccaggggaactatctgaccgctaacgacgtatccaaaatacgtgttggcatgacgcaacaacaagttgcgtacgcattgggtacaccgctgatgtccgatccatttggtacgaatacctggttctatgtcttccgccagcaaccaggtcatgaaggtgtaacgcagcaaacgctgacgctaacctttaacagtagcggtgtgttgaccaatattgataacaaacctgcgctgagtggtaactaataataaagttgctctcaaagacgttaaaaaaggtgctcaatgagcaccttttttctgtccgttatttattcgctgatttttctgctcgttgcctgcgaagctctttcggatcggcaatgagagggcgataaatctccacccgatcgccatcatgcacactatcgcttaattttgccggacggctgtaaatgccgactttgtttttagttaaatcgatatcggtacgcaattccagcaagccactggcgcgaatagcttcttcaaccgtcgcgccctcctgcagcgtcacgcgctgcaggtactgcttctcaggtagcgcataagccacctcaacggcaattttacctggcactgtaaacctctttcgcacgaaccgtaaaagcctggaccatattagacgccagctctttaaacacgcgaccaaaagcgagttcaatcaacttattggtaaactcaaagtcgagatgaaactcgatacgacacgcctcctggctcagcggcgtaaacttccatccaccaatcaatttcttgaacggcccatccaccagattcataagaatactttggttactggtcaactggttgcgggtagtaaacgttttgctgatcccagccttagagacatctaccgccgcagtcatctgcccaggagtggactccagaatccgacttccggtacaacccggcaaaaactgaggataagactgaacgtcattcactaactgatacatttgctccgcgctgtagggtaccagtgcggtccggctaatctgaggcataacaatttccatcaacaaaaatccaacaaataatatcatttatcctgcagtaaannnnnnnnnnnnnnnncgctgggtaacatccggttcatgctaagatagagccttgtcccccgcaggattgatatggggtattttcgatttcagattaccgatgattcacgacgcttatgacgaagaaaaaagcacataaacctggttcagcgaccatcgcgcttaacaagcgcgcccgtcacgaatactttattgaagaagagttcgaagcgggacttgccctgcaaggctgggaagttaaatccctgcgcgcaggaaaagccaatattagcgacagctatgtccttctgcgcgacggagaagcgttcctgtttggcgcaaacatcacgccaatggctgtggcttctacgcatgtggtgtgcgatcctacccgtacccgcaagttacttctcaaccagcgcgaacttgattcgttgtacggtcgcgtcaatcgagaaggctataccgtagtggcgctctccctgtactggaaaaatgcctggtgcaaagtgaaaatnggcgtcgccaaaggtaagaaacagcacgataaacgttcagatatcaaagaacgcgaatggcaggtggataaagcgcgtatcatgaaaaacgcccaccgttaaacctgcactccaattcttgaccagttcctcaccgcgcctccctctccggcggcgcgaatgaacatcttattggctatcacatccgacaaaaatgttgccatcccattgcttaatcgaataaaaatcaggctacatgggtgctaaatctttaacgataacgccattgaggctggtcatagcgctcataaatctggtatactcgccgttacacattggggctgattctggattcgacgggatttgcgaaacccaaggtgcatgccgaggggcggttggcctcgtaaaaagccgcaaaaaatagtcgcaaacgacgaaaactacgctttagcagcttaataacctgcttagagccctctctccctagcctccgctcttaggacggggatcaagagaggtcaaacccaaaagagatcgcgtggaagccctgcctggggttgaagcgttaaaacttaatcaggctagtttgttagtggcgtgtccgtccgcagctggcaagcgaatgtaaagactgactaagcatgtagtaccgaggacgtaggaatttcggacgcgggttcaactcccgccagctccaccactnnnnnnnnnnnnnnnnnnnnnnnnnnnnnnnnnnnnnnnnnnnnnnnnncggttcagtaacacccgatactttttcnaggcnnnnnnnnnnnnnnnnnnnnnnnnnnnnnnnnnnnnnnnnnnnnnnnnnnnnnnnnnnnnntactgtagttnnctttacgatttatagctgtactggtnnnnnnnnnnnnnnnnnnnnnnnnnnnnnnnnnnnnnnnnnnnnnnggganctcnnttcgtagttttnnnnnnncaatatccgactcgatatgtttctggtaaaacttgtcnnnaannanntttgctatggtatctgatgtacgnnnnnnnnnnnnnnggctcataccatcacaaagagcannnnnnnnnnnnnnnnnnnnnnnnnnnnnnnnnnnnnnnnnnnnnnnnnnnnnttgtgctgccnnaacatcaagggnnnnnnnnnnnnnnnnnnnnnnnagaaaaaaganncttnnnctctcnnnnnnnnnnnnnnnnnnnnnnnnnnnnnnnnngtaatnntcaatctcctggttgatcacccttgagggatatactatcnnnnnnnnnnnnnnnnnctcatcaatatctttagtactctgccttctcaccgtttccannatannnnnnnnnnnnnnnnnnnnnnnnnnnnnnnnnnnnnnnnnnnnnnnnnnnnnnnnnnnnnnnnnnnnnnnnnnnnnacctcatcattcnnccctcggaaagagttcctgaaggagttttctctatggcaacttataccaaaagagctgaaagacgtacctgtagnnttcannnnnnnnnnnnnnnnnnnnnnnnnnnnnnnnnnnnnnnnnnnnnnnnnnnnnnnnnnnnnnnnnnnnnnnnnnnnnnnnnnnnnnnnnnnnnnnnnnnnnnnnnnnnnnnnnnnnnnnnnnnnnnnnnnnnnnnnnnnnnnnnnnnnnnnnnnnnnnnnnnnnnnnnnnnnnnnnnnnnnnnnnnnnnnnnnnnnnnnnnnnnnnnnnnnnnnnnnnnnnnnnnnnnnnnnnnnnnnnnnnnnnnnnnnnnnnnnnnnnnnnnnnnnnnnnnnnnnnnnnnnnnnnnnnnnnnnnnnnnnnnnnnnnnnnnnnnnnnnnnnnnnnnnnnnnnnnnnnnnnnnnnnnnnnnnnnnnnnnnnnnnnnnnnnnnnnnnnnnnnnnnnnnnnnnnnnnnnnnnnnnnnnnnnnnnnnnnnnnnnnnnnnnnnnnnnnnnnnnnnnnnnnnnnnnnnnnnnnnnnnnnnnnnnnnnnnnnnnnnnnnnnnnnnnnnnnnnnnnnnnnnnnnnnnnnnnnnnnnnnnnnnnnnnnnnnnnnnnnnnnnnnnnnnnnnnnnnnnnnnnnnnnnnnnnnnnnnnnnnnnnnnnnnnnnnnnnnnnnnnnnnnnnnnnnnnnnnnnnnnnnnnnnnnnnnnnnnnnnnnnnnnnnnnnnnnnnnnnnnnnnnnnnnnnnnnnnnnnnnnnnnnnnnnnnnnnnnnnnnnnnnnnnnnnnnnnnnnnnnnnnnnnnnnnnnnnnnnnnnnnnnnnnnnnnnnnnnnnnnnnnnnnnnnnnnnnnnnnnnnnnnnnnnnnnnnnnnnnnnncannnnannataacaaaacannnnnnnnnnnnnnnnnnnnnnnnnnnnnnnnnnnnnnnnnnnnnnnnnnnnnnnnnnnnnnnnnnnnnnnnnnnnnnnnnnnnnnnnnnnnnnnnnnnnnnnnnnnnnnnnnnnnnnnnnnnnnnnnnnnnnnnnnnnnnnnnnnnnnnnnnnnnnnnnnnnnnnnnnnnnnnnnnnnnnnnnnnnnnnnnnnnnnnnnnnnnnnnnnnnnnnnnnnnnnnnnaaatccgttcctgtatggttgnntacannnnnnnnnnnnnnnnnnnnnnnnnnnnnnnnnnnnnnnnnnnnnnnnnnnnnnnnnnnnnnnnnnnnnnnnnnnnnnnnnnnnnnnnnnnnnnnnnnnnnnnnnnnnnnnnnnnnnnnnnnnnnnnnnnnnnnnnnnnnnnnnnnnnnnnnnnnnnnnnnnnnnnnnnnnnnnnnnnnnnnnnnnnnnnnnnnnnnnnnnnnnnnnnnnnnnnnnnnnnnnnnnnnnnnnnnnnnnnnnnnnnnnnnnnnnnnnnnnnttacagatgnngtaaaatcannnnnnnnnnnnnnnnnnnnnnnnnnnnnnnnnnnnnnnnaaaagacaatgcaaaaccaaannnnnnagaacgagacgtaagaatgttcgaaaatattagnnnnnnnnnnnnnnnnnnnnnnnnnnnnnnnnnnnnnnnnnnnnnnnnnnnnnnnnnnnnnnnnnnnnnnnnnnnnnnnnnnnnnnnnnnnnnnnnnnnnnnnnnnnnnnnnnnnnnnnnnnnnnnnnnnnnnnnnnnnnnnnnnnnnnnnnnnnnnnnnnnnnnnnnnnnnnnnnnnnnnnnnnnnnnnnnnnnnnnnnnnnnnnnnnnnnnnnnnnnnnnnnngttttcccacgtcccgtcagcacgcaggatttgcagcggtcttaccacacactgtatctgctttttatctgcatccagtatcaccacctgtgtgattacnnnnnnnnnnnnnnnnnnnnnnnnnnnnnnnnnnnnnnnnnntgccggtgcatttatctccagcaccagactttctatctcaacgccatacgctgcattttttgtaacatccgtcagcgtcagcgcattcagtcccagtgtcagactgtcttttataacctggaatgccggnccagccactccattcagtttcggagtaacnnnnnnnnnnnnnnnnnnnnnnnnnnnnnnnnnnnnnnnncggcggtgaacaccagctccagcgcctgccagtcgttactgnnnnnnncgaattcccccagcttcgtgtttcctnnnntcctnnnnnnnnnnnnnnnnnnnnnnnnnnnnnnnnnnnnnnnnnnnnnnnnnnnnnnnnnnnggtctgngtnaagtacgacatcaggaacggattaccngnnnnnntnatcgncacaccatcaggaacnnnnnnnnnnnnnnnnnnnnnnnnnnnnnnnnnnnnnnnnnnnnnnnnnnnnnnnnnnnncagncggaacttacaggnnagtnnnnnnnnnnnnnnnnnnnnnnnnnnnnnnnnnnnnnnnnnnnnnnnnnnnnnnnnnnnnnnnnnnnnnnnnnnnnnnnnnnnnnnnnnnnnnnnnnnnnnnnnnnnnnnnnnnnnnnnnnnnnnnnnnnnnnnnnnnnnnnnnnnnnnnnnnnnnnnnnnnnnnnnnnnnnnnnnnnnnnnnnnnnnnnnnnnnnnnnnnnnnnnnnnnnnnnnnnnnnnnnnnnnnnnnnnnnnnnnnnnnnnnnnnnnnnnnnnnnnnnnnnnnnnnnnnnnnnnnnnnnnnnnnnnnnnnnnnnnnnnnnnnnnnnnnnnnnnnnnnnnnnnnnnnnnnnnnnnnnnnnnnnnnnnnnnnnnnnnnnnnnnnnnnnnnnnnnnnnnnnnnnnnnnnnnnnnnnnnnnnnnnnnnnnnnnnnnnnnnnnnnnnnnnnnnnnnnnnnnnnnnnnnnnnnnnnnnnnnnnnnnnnnnnnnnnnnnnnnnnnnnnnnnnnnnnnnnnnnnnnnnnnnnnnnnnnnnnnnnnnnnnnnnnnnnnnnnnnnnnnnnnnnnnnnnnnnnnnnnnnnnnnnnnnnnnnnnnnnnnnnnnnnnnnnnnnnnnnnnnnnnnnnnnnnnnnnnnnnnnnnnnnnnnnnnnnnnnnnnnnnnnnnnnnnnnnnnnnnnnnnnnnnnnnnnnnnnnnnnnnnnnnnnnnnnnnnnnnnnnnnnnnnnnnnnnnnnnnnnnnnnnnnnnnnnnnnnnnnnnnnnnnnnnnnnnnnnnnnnnnnnnnnnnnnnnnnnnnnnnnnnnnnnnatntcnaattcaccctgcatccagcataccgccannnnnnnnnnnnnnnnnnnnnnnnnnnnnnnnnnnnnnnnnnnnnnnnnnnnnnnnnnnnnnnnnnnnnnnnnnnnnnnnnnnnnnnnnnnnnnnnnnnnnnnnnnnnnnnnnnnnnnnnnnnnnnnnnnnnnnnnnnnnnnnnnnnnnnnnnnnnnnnnnnnnnnnnnnnnnnnnnnnnnnnnnnnnnnnnnnnnnnnnnnnnnnnnnnnnnnnnnnnnnngnnctcatatcctgcacatcatgcagncnnnnnnnnnnnnnnnnnnnnnnnnnnnnnnnnnnnnnnnnnnnnnnnnnnnnnnnnnnnnnnnnnnnnnnnnnnnnnnnnnnnnnnnnnnnnnnnnnnnnnnnnnnnnnnnnnnnnnnnnnnnagtaccantccggctcagtnnnnccactgaccaccacatcacctnnnnnnnnnnnnnnnnncatcagggtataaggagttatggccacaggnctaccaaacggcnncnnnnnnnnnnnnnnntttgcgtgagcttgtccgccagatctgatggcgatgctgcccgcacaatatcgtaacgattaatcgacatcgaatttctcccatgcacaggaatagagtnnnnnnnnnnnnnnnnnnnnnnnnnnacaggatgagcatctnncagtnnnnnnnnnnnnnnnnnnnnnnnnnnatgcgcagccaaaactcacaaggaaaatgataagtagaatcacaactttgatatatnnnnnnnnnnnnnnnnnnnnnnnnnnnnnnnnnatnngcnnctgaatccgcgccccccagtattccagcctgctgataacctcttacacatgggattcgctatacggcagtatttctaataaacagtaagtnnnnnnnncaagcattattcagactgtttcttttcatcaccgaccaccgtaatgtcacaatcccacgcttcatcacaccatcagccagtaccgacatcagacgcccggtganntnnanngccaccaccagaaacaacatgatgacagtcagcccnnagcgtgcactttccacaggtactgccccannggtnnctgcagagcctgcgccagtgggtaaccagcctacggataaagtcacactgactatcccgtaaccccgtccctnnnnnnnnnnnnnnnngatatgcaccgaacgtggcgcagatatnnaaaaagcccgnngaagcgagactgataataaatctggnnnnnnnnnngggaatcgaacccgcatcatcagcctggaaggctgaggtaatagccattannnnanncnngcatatggtgccgactaccggaatcgaactggcgacctgatgattacaagtcagttgctctaccattggagctaaaccagcatgtttggcgggacagcgtggactcgaaccacgataagaaggttaacagccttccgtaatgaccnnnnnnnnnnnnnnnnnnnnnnnnnnnnnnnnnnnnnnaacttaagagtcactaacggnngcttaccttctaattnnggccaaatnnatanntgcatgtcaagacttttaacagcaatnngtttaactttctcaacacgtttacgcattttgaaagcatnnnnnnnnnnnnnnnnnnnaacaaataatgatgctttcaggatgtcgtcaatttcatttctacaggttgccagtgaaggttttctccatccctcnnnnnnacgtccacacatcttgcgtggctttgcagnnnnnnnnnnnnnnnnngcaattgctcgcttagatgaaccatgagcgtagtagctgaggaggatgccaaannnnnnnnnnnnnnngcacatgacggaatcgacgacctgagaaatcaacattccatcatcatcattgcacattggccttgnnnnnnnnnnnnnnnnnnnnnnnnnnnnnnnnnnnnnnnnnnnnnnnnnnnnnnnnngcttttccagacgacctgaataaacccanncgccccacagttcaagccagccattcannnnnnnnngctgttctttggnnaggttnngnnnnnnnnnnnnnnnnnnnnnnnnnnnnnnctgaatcaatgtgaggtttccgcagaacnnnnnnccagtatcgatatacatctggttgnnnnnnnnnnnnnnnnnnnnnnnnnnnnnnnnnnnnnnnnnnnnnnnnnnnnnnnnnnnnnnnnnnnnnnnnnnnnnnnnnngtgagttgctgattcgttcgcgnnnnnnnnnnnnnnnnnnnnnnnnnnnnnnnnnnnnnnnnnnnnnnnnnnnnnnnnnnnnnnnnnnnnnnnnnnnnnnnnnnnnnnnnnnnnnnnnnnnnnnnnnnnnnnnnnnnnnnnnnnnnnnnnnnnnnnnnnnnnnnnnnnnnnnnnnnnnnnngtgattgacgtttccacgctctgnnnagccatcaatcatcatttgctcatggtttccacgtacagctctgaaccaggggaatgtgannnnnnnnnnnnnnnnnnngttctctgtaccgcgatcaaccaaatcncccaccgagataagnnnntcttttnngntgtcgaatccnatnnnnnnnnnnnnnntcatcaggttcgtgtagcatccgtgcagatcgccaactacccaaatatttcggtatttgctgccatcaattctttcgtagannnncatgcancctcacttctgctgtttcgcagttttttnagtttctgttgatactccnncttgatggccctgcactcttcgannnnccnnnnntngcggttatggtctgattcgatttcctctactgcnncnnnnnnnnnnnnnnnnnnnnnnnnnnnnnnnnnnnnnnnnnnnnnnnnnnnntgagcgttccgcacgagatacatnnnnnnnnnnnnnnnnnnnnnnnnnnnnnnnnnnnnnnnnnnnngtnnatctttctgtttctgctcctctcgtcgtcgtttcttctctgctgcnttttnnnnnnnnnnnnnnnnnnnnnnnnnnnnnnnnnnnnnnnnnnnnnnnnnncgtttttctgaccttggcaggttgttcttcagtaggcaaccagtcattgaaaaatgagacgcaggaaagtgtgaaaaccaaaattgttaaaggcaaaactacaaaacaggacgtgttagcatcgttcggtgaacctgacagccgttctttgatcgatggtgaagaacaatggtcatacactatgtatnnnnnnnnnnnnagcaacctctttcatccccgttgtgggactgcttgcaggtggcncagactcacaaactaaatctctgacagtttctttcaaaggcgaaaaagtcagcacatacatctttaatgctggaacaagcaacgtgaagactggcattttttagannaaagacaaaaccagcatcaagggaaaatttagcccgcagttgatacctacgggctttttacagaaacataaatcactttttaannnnnnnnnttatctttttcannctcccccaaactttactgttcatttctacagtctcagtattttcctttaaagaggatcttattggctctggctctggctctggctnnngcnnnnnnnnnnnnnnnnnnnnnnnnnnnnnnnnnnnnnnnnnnnnnnnnnnnnnnnnnnnnnnnggctctggctctggcaaaggagaactaaaatctaatgaagtttcaatattatattcatgatttttatggtctatatcagataatgaaatgggttgttcattcaatgatgatacagacagatcattttcaatgtaataattactatcattatatganntttcaaatttacccaagaaagccacatatactaatttanannnnnttgtcttaaatagaaacttatcattttcatccggcatcccaaaaaagaaaaccgtcaagtattttttagcattccttttatctttaagccccttataatacctatcagcttccttcctttgcttttcatattccttccaaaacacatccttctgacttttattccagtcagaaacatcaatttcaagcgtaaatggttttgggttttcttatcccttgcgaggaaagtaatacaatgtttatctgaatcttcatgcagacgaatattagactgggctacaccataataaatagcaggtttgtaataacgtatgttgtttttgtaaaaaataagttgaaatgtatctttannnnatcgcgtgccatatggagggattgatagctgttcattatgattgctattatttatgtaatagtcaacgactggcttaatacttgatgaagatacaggatgttcattaccttttttttcnnnnttgtgattttcatttttaatatttctggcatttttaacaccacctcttggtttcacnncannnnnnnnnnntgatataaccggagcaggtggcgaattatgttttctttcgtcatttgaagtatgattgtttttatatcttggatcatgaataccacatccatcnttatgtttatcgccatatctgaaatatgattgattaacatgtttcatagtaaaactacaaggtgtggctttaattttacaaggctcgtatgggcattcaaaactcgttgtcttaatgtaaaaatcatccattccacggagatcatttccatgaatgatttcatcagtcgaactatccttcgcaatcgncatatcttaaccctatgaaaatctatgtccttctaaggattctagctttttcttattgacgatccaatcaaaaaatnnnnctccaacttaccaaaatacacgatcaagcagaagtnnnnnnnnnnnggggtagaattagtatttttcaaagaaattaaatgtttgacagaatgatgctgaataacatcgctaaccttagtaaggtcagggagttgttatacacaactcccctctattatcgtttgttaaaggtnnnnnggtatgtatgcatggtaacagtaaaagcatcttagaggannnnnntaagcattaattagattcatggaattatagatttacgannnnnnnattaaaatttagactatagattaagtaagtctaatgaaaatcatacaaacactacaacccatatcttttccttttatcctttttcgataattctctttttagagttgaagcctcatatttccttttctcattagcatagactttctctgttcggctaccattactgactataaagttaatcaatgaagaacatacatgcttcatacgctctttgttgatcaaatcatcatccagtttatttatatgactataatatgaaagtagcagaaaggttaaaacaacctccctgttggagaaggtcattttttctataccactctggtatttgatataaaatcctgcacaaaaaagatatgattgttcgataattcgttgctctgagaaacctgattcagcgagtttatcaacgaatcgatcaagcagaagaagatacctttccattaagttaatatttgttttgtccataatatgcatccttgcaatagtgaaattttgtcgtcctgannnnnnnntaaataacataatatttcaccatgtcaatagctaaaacctatcaattttattaaaggtattttgcaggtaacggattattaagttcttcaatcgttatttgtttaaggtgagcattataaagccatactttgaactgctctaaatagcgttcatttaatgccttcaaagcttcattttctgcttcaagtcttttaattcgttgagaagccacttttaaattagcaggttttacagtgtgtattacaccagatttgattgtgttttttttcacatttgaagctttccgcaatccttacatgactacttaaggattgtcttgatggtcttttcccaataaccctgactaacctatcgcacaaagcattccaggttagtttttcatctatagaccatgtgttaataacatctacaatcttcttctcatgataaccatttatatgcttagccatttattctcctttttttatttttttatggaattcataccatttatcagcatttatgttcccatcatttttatcatacagtgttctttnnnnnnnnttatcgtggatatttgaaatcgtttcgttatctaaaccagagttcttaattggataattatcacacggcttaaacgcatatgagtgcttgcagtagccatgttttgatacaagtactgcaccactactaagtgagtcnaaactcattaagatccactactggaatatcctttattctgtgctcattaacacatactgataactttttttctcttattgctttagacatttgaagatgcgatctgtggtcataagaaacattttgagaaataagcttacgtccagaccagcgagcaatactaaattcatccataccatttattngagcaaatgtgttgagaagatgccttagttgatgtgttnttagcaaatatgggctaccatcttcatttatataaccatgtcttttaanaacattaaaataccnttttatataatcagaatcaatgatatcagttttaaaaaaattcgttgtaggtctgaataatttatctgacatttcctttttatttttatttaactgtccttcagttaacaagcaaagcgcattagaatatttgattttcttctctctatcataccaaaagagatcaggaggtatattttctttaagggttcccttcgttgaattagagtaattcttttgaatttcagcagccaataacctcgcttgacttgataattcttttaatctgctaatagcctttttagctacaggtatcattaaagttggaatccattttatattgccttcatacccttttgctgaaaaaaatcttaaaccgtatctttgaatgccctttccatcacattctgtgatttcacaatccgctggcaaagctaaaatttccgatatcctactcggtgcacacataagtaaagcaagcacagatgtagtaaatatatctcttgacgataattgttcatcccgctttgaaaaaatctcagcaatcgcaataactgatttgatatcaggcaatctagaatggccttccagtgaagaatcataaccagtccaagactgagtaatcctatacctaattggatttacccaaaataaataaaatgagttagtcatcctattatcatttaaaaatgaactcaatttctcaagttctttcccaatagcaaatgcatgtgctttagaatacttttcagaggctatccttatgcattcatcatagattgaattgttgcaatagtttacattagcttccatattgattttaagtaaaacgaattcgacaatcttcaacattgataatgttgagtgtttcgtcttagatttattgaatgaatgcacatgcaacatatatgctttagcaaaattaataaagctatcatctaagcactccttgctgtttaggttgttttttgagttaaacttagtaaacctatataaacctttccatttattgctttcccatgaagttgttaaattattattagaaatagtactcttacaaaactcgataaacttaataacattatcgagagggttgtttttattgcttggttcaaanataaatatattgttcataatgctctccagggattgaattttttacacgttaaacatttcaaatcctctttcgtatcttccaataagaaaaatgcatctgaaacaaacttgataaaaaagttcttgttttcttcaatctctatgcccataagtatattagataaggggttaaaaaacgcacttagtctcttatcgatgtcataaacgttgtcaggattattttttatatatattatagaagagtttactgatttatgatctaacgctttagcaatcacctcaattgaggctccttcattagccagtcgacttcctaacgtatatctgaatcttctagcattaagttctatatagctgttagtcctttctgacctaacatcgaattttgacggaaagtgttttaatagttttgacataactgaatttttcatatggaaaaaatctgttgttaaatcatataaaaaatcctcaatcctttttgtttccgtaatcttatctaaattcatgaagattggtaattcgcctctatagttactaatcccaacactgaatttatcttcaacaaacgcctgattttgattaattagcattgataagctgtcatataagaacggctctatcataaccatgttaaattcttttctgaaacattttctttgttttacttttggtacattcaaaaagcaccctctctcatttttaatgagatctttagcttttagagatattaattgtaatggccttcttcctgttattgccagcaaaaggatataacaatacaaaaagcattgaattttcttctcatgataaaattttccaacggcgttaatgatgttattgaattccgtttcagttaaaggtcctttatttggatctcgtcttttaactgcatctcctgtttggtttggaatgatttttattttctccagcattctaatggcagtcgcttctaccccagggtaattgagatttttccatttaatgatgaaagccttaattaagtttagtttgtagtttctttctgaacctaaataaatattcaattgatatattgctttgtcatcaatagtatcgatagtcatcgcaccaaaccactcataaaatagattattaatactttgaatataaaaagaactatattcagacgcatagtaagccaatgtttttaagtagctaagtttcatttttgtaggcattctatctacaactttatgagggtatacgcagttttctttatccagttgccatttcttatctgacagtttgaaactatacctgttcatcttagcaaaaaagatttgctcactttcaatacatttgttttccatactaaactccactaattattttacttactgatttatagacctttaggacgacatccttctcttgttgcgatatatatttatagttgtatctatcacacattattgactcctttgaccaacccattaaataattccttaaatcttnccttctattatattctaattcagcaccttctattnnnnttagaatacatataattccaagagtgccttaacctatggcctgaaagattatatagctctggacttgctcgtttcagtgttgatatcaccttctcataagctgaaatgcttaagggttctcctgcgttttttccggtgcaatgagccacaaataagaaattatgctttttcctttttgtcattttttctctgctattgcttatgtaatcaaaaatttcacgggctaactcattagataacggaataaccctttctccagtctttactaatggttgataagatcttccatcttcttttgaatcatgtcttctgactacacttaaagtgttgtctctgagatcaaaatcatctattttaagattgagcaactctccagcccttaaacctaaatttaagagcaaggtaaatattagtctgttcctgacctgtacttccttatggaaagggttttcaatcccgccaatttccaatagacggaaaagcactttgatctcttcttcattcaacgatttttcagatatttcattcatattcaatgaactgtttcttggaatatgtgctctgatactttcaataaatacgtctacttcatactttgcatgaatcccctttgacgaatgaactaatccacataaccacttaaggtagcgtgaaaaaacgtgtattctataactaaaggttctcttcgcaataaacctataatttgtcgattttatatttatgattttttgtctgtcgaatctttgtttcgcatatcttaccagatcatctatttctgcaacgctgagatattttttaagttcaactctctcaattatatcaattcccctaccatccaagaaattactgaaaattagtaagttagttgcaactatttccatcgttgaggccgttgcgcctctatttcttatgtctgtagtaagaaatagattttgatagtaagttggtagattactttttttatcaaggatcaggcatcctcgctctccactactcatgatgaatttctttactttatatcccattttcacctcaaacttaacaaattaatatcactctcacttattaaatatattccaattcaaaataattcaaattttttacaatgaatcttgtttaattggtatatatattaatggcttgaaaannnnnnnnngacgtcaaataaacaggtacggctagtgggctgtatccatacccgatattaagaaaaccatctctaagccttatagcaaaagctctgccagaaaaaacgtaaagaattacgttaaatatagatttttttaagatttaaactttacaaatctgagaattaatcctcataaataagaagactgtcattttatttcaggcaacatgctttcttgaattttcgatagttaattgaatccattcgtttacttcactttcaatgaaagcaacagagcgcgcaccgattttaacgggggaaggaaaacgattttggttgatgaggtgatagatccaagctttaccgtatccagttcgatgcagaacctctggtaaacgaataaggcgggtgttgtgctgattcatagtcgtttcctctgtgccgttttgatggaaatgactatacaaatgaatcagcaggaaaaagaccgaagctgggaacgccagagctaatggaggttggtcttagtcagaatcagcgattttcatcacgtctgaaactctgatctttttcaaatggctgttcttgttgatgaacagattaaactggcgaataaaaggtatactcgccgccttcaaagcaagaggtttgtctgtatccctgatttggtggttcaggcgagtgttgatctcatcatcgtcatctgtatacaacaggcgagaaaggcggtcttctgatatacgtactttatataattttgaccataccagaatgtcgatcatgggaaggagtctgtaattaatgattttcttaatcgttccataaccaaagcgaatagcttccgttacatctggttctatgccacgcactttacgccattgaggaagtgcagcctttagggattcagcgatctcttcatctgtcccgtttgctaggtcgatttcgaccatgacagtatccctgaacaattttggcaaaacttccgatacagggctatcgaggaattctctgttaacagaatactcatcgcttccatcccaaaaaaacagtgagttccgtaatccaactatgctgagttgagccagtctttcggttgtcgtcaaaaagaagtgcgggggctggtaaagagtatcctctcttgtgagatagccgagatgcttttctgtgatgagaaagggctttccagtgaagatcctgtcgatgtagagccttacggcttctgcttcaaattcttcatgatatggtttgaagaacaatgtccttgccagcaattcatggtagaggtgtataagcggaagctcttcgaatccgcgatatgtatctatatccagccacttcttcacctctctcgtatgttcaactgaccagtttttcataacgatctccaacaggcattagacttaatgtatgtagcaaacgtaatcgacatgttaaaggaagaccaatgaaatgagttcagatgccatcaggaagttgaaccaaaaggtttgatattttttgatacagttcgctaacggactattttcaggggtttatgccgttacgatttatggttcctttatagaaccaaaggtaaagtcagaaacagcagttatctagaaaattcaatcaaatagatatctagttacagggacgccagccaatcatgattggacggtgtaaggacaacaccaacaaaaacaggaagttagaagtctcagcaggacaccgaccagacggtgaggagacataaaaggatacgcaaaggagccgcggctcctggtgacatgaaagcccacagatgtgggctttttcgttgatggtcagaacgaccagttcacaccagctaccgcgttccacggggattccacaccggcaccatggctataccccaccccaagatgcccgcttaacgtactgctgaatgaggctttaatacctgcctggtatattccacgtctgcccgacaaatcattgacgaaattaccgtcattattcaccttcacccggttatcatcgacaaattctttgcgcacagccgccttcagccacggctcaatttccataccgttccccagacgcatgttgtaactcagcgttgcgcccagttcacgatatatactgcgggtatcgactgatttcgattccatgccattggataaatgatattcggggttatcagcggtgaaccccgttaacgatgcatacggcgtcaggttccagttaccatcggtaaatcgcatcccggtttcaatgtgaccgcccagcccgttgctgtggtaactgccattggcggctccaccgctgctcattttaccggctacgttactttcaaaacggttcagcttcacgacaccgtccagatagaaaccactttcatgttcccaactggcatagccgcccagagaataactgcccacactgccatgtcctccgcgatcaaaaccgatatgtgaatgggaataacccataaaagcgcccagcgtcgcaatcccctcaggaatatcattagggctgtcgatccccactgtcattccggtcagcgtctgctcaaacccggcccccgcatcggtggtgacattattacgggtgttatacntcgccccccagacattattgttgtgtggactcgctttcattatgttcaaccgctcgcgaatactgtttagctcagcatcaaataccaacggtaatgttgctgccatattgagtacggctgcggtagaaggcgtgatgcgtttctccggaacgggtgtcggcgttggctcgggagtcgggtctggtttcggatccggttttgggtctggttttggatccggcttcggatttgggttgggatttgggttgggatccgggttgggtttgacatcattggtcaggttccagttgctgttgccatcgcttttcaggacatactcataggtcccaagatcaacgaaaccgccagtattgcccagcgaaaacgaagcatcccctccccctgttttcaccagcgtcatcgcgtcgtcagactgaggactgacgccggtatcctgaacaaagattttaaaattaccagtggcgttgttgttgacgaccagttgatcgccccgagagcctgcaacgttggtatgcaggtagaaattaccgctaccggaaagttcattggttgtcagcgtattgtatataccgttagttgtggcaggcgctnctgtttgtgctgataaataaacattaccgtcgttaagtagcaaactgtttactctatactcgcagttgctggtgcctgcacaggaattattgctgttaagccagacactgccccggctggcagccgtcaggtcggcaagcgtcgtatcaacgccattgccgatagttaatgtcgcgctatcggtaatccggatcgccccttcgagtttaactggcgtaacattatcccgtggcgtcattaacgacaggcttcctgtcgcgccactgaccgatgcatccgccagcgtacctgcgtagacnattgctgtcccgccagcaacctggagatcttctgcccgggccanagcctgaaactcatcttttgaccgcccaagggtatattgcccaccagagttaacctttgtggcggagtcctgaccctggttttgcattgccccccccttgccaaccgtggagtcgcgagcttcggtacctgctaataccaataaattaccgccattttccagcaacatattggtcgctaaattgccggaaatggaaaaagtgccgtactggtgagtaccgctgatttcaataccgttagccgtgctcgtctggagagcggcaccgctgttctggacgatatctgtcgctttgccattatcgttgactgtcagcgtaccgccttcattgatcgttgtttttattgcctctccgttagctgaaactgtttgtattccgccgtcgttaatngttgtctcattcgccacaccctcgacaatttgttcaccgccggtgagcgtcgtgcctgtcgcagtggcttttgttttgacgatctcccgtccgcccgtattgacctgtgttttgtcagaagaggtgtctgactccacggttaacacnccgccatttgccagcaggatattgttcgccgcaccctgctcgatgctgaacgcgacgccatccgcgcgtgttcctgtgacccgcgtcgccctggtggttgcaaccaacgcgccctggctactctgctgtatccccgttgcgctgcctttctcccgcacatcgagtgtgccgccatcattaagcaccgagttttcagccagaccgccctcattaactatctgtgaaccgccattaataatggaaccttccgctgtcccgtttgccataatttgttgtaggccagagacgatatcggtattgatcgccttaccataattctgaacggtttgcgtgccaccattgatgtgtgttttctctgttgacccaccatcaacaatttgttcaccactttcgatatttgcttcagtggctaaaccatataccgtttgcttgccacctttgatatttgctttatcagaagtggcactggcatatattgtttgggtgccagcactattgagtacagtgccaacatcttttccataaacatccattttgccgttggcattaataatcgtgtcaactgcccgggaaccagtgacgactgttaatgagccagcgttttccagcactacatttttagcttctgaattcatgatgtagaaagcatcaccataactgttggttccttcgataagtgttccggangtcgtggaagcaattaatgcgccgccggattgttgctcaacatgcttagcctcaccaccgtcctgaacctccagaacgccgccattattaagtctggtgctatctgttttagcctccttctggacaatcagcttaccgccagcatcaatggtagtatttttcgccgaggttttagccactaccgtcagttcgccggtattttccagcacaacataattagcctcccctccggtaatagtgaagtgagagagcttgttgtatccttcgatatcagtccctgcacccgtgttggcaactaaagcactgcccgtctcctggttaaccccatgtgcaataccgccggtatagacaatcagcgagcctccggcgctaatattgctgccaattgccgtaccatctttctcaacaacctgccggctcccggaggatataattgttgtgtcagctttcccgccgcttttgatattttgcgttccgctgttgatattggtgcctgtggctatgccataattattaatattctgtgtgccaccattaattatggtatttgtcgcgtttcctgcaacatccataaccccgccattatctattcgggtcgcatcagctttagcattngttaaaactgacattgttcctttatckttaataatcgtcttgtttgccgaaccatatgcgtttatgtctaaatgaccaccgttttccagcaacacattgtctgccacgtgattgtggatggagaatgcaccttcactattcgtaccgctcaccgtcgtaccgttagtgttagtttttaaaattgcaccatcgtgctgggtaacatttgttgccgtaccaccactaacatcaagcacgccaccggaataaacttcaataacatccgaggagctggtgttatcaataatttgcgtaccaccagaatagatctgagtattttttgccgttgacttactattcagagactgagttccgccttcaatcgtcgtgtccagcgcacggctctcatatactctttgctcaccgccatttttgatggtggttgtttctactgtgctctgttcaacatactgtcgaccaccatttatggttgtgttcgttgccagacttccttgtactacgtcctgagagccagacttatttatcgttgtaccatcagcatgcccttgaacttttactatctggctaccaccatcaatgagtgttccattcgcactccctccctctacgcgtgaagcaccgcccttaattgtcgttccattgctgataccccctttataaacgtcctgattgccactctcgattatcgtacctgtggaaatacccccgtcatgaattgactgtctgcccccgttaatggtggtattattagactgccccacataattgttatgccttcctacatcttgatatccaccagattcaataagacttccattagataccccgccataaacattctgctggccatggttgataatatgagtgttatttgttgtacctcgttcatctactcgttggctgccatctacagtctcatcgtttaccacaccaataacatcaggagtgaaggcagccatcccgggcggggcatatatcaaggcagntatcaataaggaaagtactgagcgacgacaataatagggactggtcctgttcataaatttcatcctctgaaaagtgaatactgagtagcgtttaagcgaccttagctttgctgcaacatcagcccacaggcaccagaccaggggattcatcctgaagagacagcgcaagtgtattgtgttcaccgctcatcaaagacatcatgatgaaatgatgatattccgcataagaatgaggcattttttaaacgcagtgcgctgaagtgtggttggataaaaaagtcaatccattcaggaaatacgggcgtattcttttctttcgacaatgaggccgttggcaaaataaaatgatttacataatcgtttctgatgaatatcttctgctcacataaaaatcacacaataactttgagatcgcagattgttttacttttacagcattcgtccccccattgttgggcaaatatagattgggccagagcacgaaagttaataccacgttcgcacagctcctccaacagcacgacaagatgccacatactgcgccccagtcggttcagtttacagactagcagtgctttccctgccgatgatgtcctgagcagttttttcagtccggacctccngccacggttttacgttgaagcggtaaccctgagcacgcagttcttcagtcaggcgtggtgcaccgtaacgctgttattgctgggtgagatcaaaaaactttcaggcagctaaggaaagttgaaccagacaatagatgaaatatttcaaccaattacagcaccaattcagtcactgccagcccaccaaataaatcaaggggttacatgaaaacgtagcccctttttctttggtagtgacactaaaatggatgtagtgtgaagaataatcccgtttactcaatcaataatacatattgtttcaatctacgttattatctctttataaaaattgccatttatttatcattgaaaactgcttttagaactttatacaagaggactattcacaacaggactattctcaatgggagcatcctcaggggagttatcatcaaagtcatcatccataaataaaatatcatcgaatggtgccacacccgtgatcatttttatttttttattacgatcagataagactccatttaaaccgttttcgcttacaggttttaatgatttttcataactctcatggttagcaggcgtattaaaaatacacggagtatcaacatcaaacaatgacattccccagttcacatattgaatatcatagttactgaagttctgtccagaaaagaagcatcccttaaaatccaatccacgtagattatataagccaccctcttctttttggagagtaatgttaattttggctatctcccggacatcatcgccatttttgtatttgaataccgtttcaagatgttctccagacagcttgacttctggaaataatttgaaatcaaagcctacattattatgtgtcaacgtagatgaacaaaagatggaaaaagcttgcagtgctgaattatagctatcgattttatcttgaggctgcgctcttggtaaaaacgtatagcaacattcataaaaattaaacagaagctctgaagaccttccatttttatcaaataatatccccttgaactccttcacaaacgcatctgttattttttgaatatctatggggtgttcctctgactctgacaaagatgaaacctcatctattttgttttcatatgaattacgtggttccatacagacatttggtggcatttctaaaataacaccattcatactacctggcttaagtgaaccaacatgaaaatcactttttattacattatcgaaaagggtttgttcatttcttttagaccattcaactaattgctcaatctcacctttattcgctgatttatgaacttcagaagccacattttccttgatctccggttttaatttaatgagaagattttcccagacctgcttgcttaaacatactacgtcaggctcaccatcagtaactaacacttcattattatcaaagtgtacgttgaatacctttaagttattttcatcaacatcatatttaatacgttttaattgttccccagctcccataatgacaaaggcgttgccttcttgatatatacattcagacattattttttgtaaaatttcaagagcaccgcgatacgtctctgatgcagcttccttacaaattaattttacaatactatgagctagtagctccatgtgtttagaagatttattttcattataacttccactaccccaaactgcgctagcgttaaatccgttgcttttattaattaacattttctattcctcagttaatgtctacatggctatttttaatgttattattgtttgtcactataaaaaatcgctcatttgagacaattgctgacattaactgcttcacttgctacgcatggaacttttaattaaattagcacaggaatgttaaatttaataaacaaaaggttatttcgctgtatgataaaaaccacccgttataatttattagtgaaaatcgtttttcgagtgttagaaatttatatctaaatagcgttgattaatgagcatagccacgctcctgtaacgctcacaaaactcatctacctgcggcgggtgttctagtcagtagtagatgtttaaggcgtggcagagacatttcatccttactctacggcattgttctacatacattggttgtggtactcccttatcatcagtgagcgaacagagaatagttcagtgatttgagtaattaacctgattaaatgaatgggtataataaatgataatacgctggctttatcgttaattacttaattccacatgtaagcaatttgcccgcttggcanagcnggcattttttccaaatacttttgaatgagtactgatagataaatacattgcagtggcgtgccacgtaccaaaacaccagccctcattcgaaaccacccaccgcacttcttccttgaaatggcgttaatcgtgaaatatagaccgccatcgagtaacccttgtacccttaactcttcctgatacatgaatgatgatttggtggcccttgctggacttgaaccagcgaccggacgattatgagtcgcctgctctaaccactgagctaaagggccttaagtatgcaataacaatacttataacccacgcaataaacatgatgatcttatgatgtaaatcacagatttttatgcgttctcatccatcctgggtcgtcaatacatgcgacataaaacccgacaccacctccattccgcaaagtcgatactcgcagtcaacaagcaaatgttaataattagcacaatctatagttatcatcgattcaatgatactttgtaatgattttgtatctaataanataagtttattacattaactgaagagttttcgcatcattatgatatctgttacttttcactccataaaaataaacttcatatagcnnnntattcttttatagaacttattctgctaataattagtttcgtatgagcgatttttgacagttgcctctccagaccacatcgataattaaaaaaacagatttaagcattatccttttccatataaatattggataaaaataggacatctgtttgcaattactttcacaacaattaaacatttttatgtttccgtatacatcatattactctaccattagaggaacgttattatgttttctataaaaccaggaccaagaaaattacctatcgacaacccctcattgttatcatggaacattactgacggggatctaaattccaaattaaatacattagaatatctaaactgtgtaacaaatattattaatgcttgtggagtttatcctcaggatttaaaagacagagaaattatatcaacttttcacgcagaaaaagtcattaatgatctgttaaaaaacgattataaaatttccctttctccagatacaacttaccgagagctgaataaagctgcacagcgtagcattacagcgccagacaggataggagaagggaaaatatgggtttatcaacgagatacaatggttgaaagaggtgataacagcggtgttcatcagtatggtccagctgaacatttcactcacattatatctgacaaaccgtccccaaaagataagtatgttgcatatgctattaacattcctgactatgagctagcagccgatgtatataatatnaacgtgacgtcaccttccggacagcaagaannnnttaaaatattaatcaatccagaacatctacggcaaacacttgagcgtaaatcccttactgctgttcagaaatcacaatgtgaaatcatcacccccaaaaaacctggcgaagcgattcttcatgcttttaatgccacctaccagcaaatcagggaaaatatgtctgagtttgcacgttgccattatgggtatatacaaatccctccagtgacaactttccgcgccgacggaccagaaactcccgaagaagaaaaaggttactggtttcacgcttatcaacccgaagatctttgtaccatccataatccaatgggagatttgcaggattttatcgcattggttaaagatgctaaaaaatttggtatcgatatcattcctgattatacctttaactttatgggaatcgggggtagtggtaaaaatgaccttgattatccctctgctgatatacgagcgaagatcagtaaagatatagaaggtggtatccctggctattggcaaggtcaggttttgattccatttactatagatccagtaacaaaagaacgtaaacaaatccatccagaagatatacatctcacagcaaaagacttcgaagcaagtaaagataatatttctaaggatgaatgggaaaacctccatgcattaaaagaaaagcgtttaaatggaatgcctaaaaccccccccaaaagtgaccaggttattatgttgcaaaatcaatacgttcgtgaaatgcgaaaatatggcgtacgaggtttacgttacgatgcagcaaaacactcaaaacatgaacaaatagaaagatcaataaccccaccgcttaaaaattataatgagcgattacacaatactaacttatttaacccaaaatatcatgaaaaagccgttatgaattacatggaatatctggtaacttgccagttggatgaagaacaaatgtcatcgctgctttatgaaagagatgatttaagcgccattgatttttcattgctcatgaagacgataaaagctttttcatttggtggcgatctccaaacccttgcatcaaaaccgggttccacaatctcaagcatcccatcaaaaagacggatattgattaacattaaccacgattttcctaacaatggcaatcttttcaatgactttctatttaaccatcaacaagatgaacaattagcaatggcatatatggccgctctcccgttcagcaggcctttagtttactgggatggccaagtattaaaatcaacgactgaaattaaaaattatgatgggtcgacgcgtgtcggcggtgaggcgtggcttaataaaggttgctctacctatcagcagctctacaatgaattccacgcattatatatagataaagcaggaatatggagcgcatttgagggtgtatttgcaactaaaaacgttctggcctttagtcgtggggattcggtgaacattaatcactctcctcatgatggactagttataataaataaaggaaacgaagaagttgaaggtgcctggcctaacaaattgcaacctggaaaatataaaaacatggggagtaatagcgttaacattnnnnttaataatacccgaaaaattatcccccctggtaaagcatttatgcttagaggcggaactctaaatatcaatattcctgggcgtagcgctcttcttttagggaaaacaggagaaccgctgaactatctctatttgtaatttaatgttatatctgccccgctaaaacggggcagataatatatttagtttactagcggtcattttgcagtgaagccatttaccgttttttatcgaccanataatctgttctctgatagtaatccccccctaacctgttgctttagttattcatttcctgtctcactttgccttaataccctacgttaaatgttaccaatttgttgcttttgatcacaataagaaaacaatatggcgcatttgtgcgcatttttcagaaatgtagatatttttagattatggctacgaaatgagcatcgccatgtcaccctacatctcataagaggatcgcttctgatgaatgcactgaccgccgtacaaaataacgctgtcgattcaggccaggactatagcggattcactctcatcccgtcggcgcaatccccgcgtctgctggaactcaccttcaccgaacagacgaccaaacagtttctcgaacaggttgccgaatggcccgtgcaggcgctggagtacaaatcgtttctgcgttttcgggtaggtaaaattcttgacgatctgtgtgcgaaccagctgcaaccattgctgttgaagaccctgctaaaccgtgctgaaggtgcgctgttgatcaatgcggtgggtgtcgatgatgtgaagcaagcggatgagatggtgaagctggcgacggcggtggcgcatctgattggccgttccaatttcgatgcgatgagcggtcagtattacncncgttttgtagtgaaaaatgtcgataactcagacagctatctgcgtcagccgcaccgcgtaatggagctgcacaacgacggcacntacgtcgaagagatcactgactatgtgctgatgatgaaaatcgacgagcagaacatgcagggtggaaattcgttgctgctgcatctcgatgactgggaacatctggaccactatttccgccatccaatggcgcgtcgcccgatgcgctttgccgcgccgnnnngcaaaaacgtcagcaaagatgttttccatccagtgttcgacgttgatcaacagggtcgcccggtgatgcgctatatcgaccagttcgtccagccaaaagacttcgaagaaggcgtgtggttgagcgagctttcggacgccattgaaatcagtaaaggcattctttctgtacccgttcccgttggcaaattcctgttgattaacaacctgttctggctgcacggtcgcgaccgctttactccgcacccggatctgcgccgtgaactgatgcgtcagcgtggctatttcgcttacgccactcaccactatcagacgcatcagtaagcgcaaaggaattgagcggatgtatgattttgtgattattggcggcggcatcatcggcatgtcgaccgccatgcaantgattgatgtctatccggatgcccgcattgcgttgctggaaaaagagtccggcccggcctgtcatcagacgggccacaacagcggcgtgatccatgccggggtttattacacgcccggtagcctgaaggcgcagttttgcctggcgggaaaccgcgccactaaagccttttgcgatcaaaacggcattcgctatgacaactgcggcaagatgctggtcgccacctctgaactcgaaatggaacggatgcgcgcgttgtgggaacgcacggcggcaaacggtatcgagcgcgagtggttaaacgccgatgaactgcgcgagcgcgaaccgaatatcaccgggcttggcggtatttttgtgccgtccagcggcattgtcagctaccgcgaagtcacggcggcgatggcaaaaattttccaggccagaggcggcgagattatctataacgccgaagtcagcggccttagtgagcataaaagcggcgtggtgatacgtacccgtcagggcagcgactatgaagcatcgacgctgattagctgttccgggctgatggctgaccggctggtgaaaatgntcggcctcgaaccgggctttattatctgcccgttccgnggcgagtatttccgcctggcgccggagcataaccagattgttaaccatctgatttaccccattcccgacccggcaatgccgtttttgggcgtgcatctcacccgcatgatcgacggcagcgtcaccgtcgggccaaacgcggtgctggctttcaaacgcgaaggctatcgcaagcgcgacttctcatttagcgacacgctgganattttgggctcgtcggggattcgccgggtgctgcaaaaccatctacgctcaggactgggcgagatgaaaaactcgctgtgcaaaaccggctatctgcggctggtgcaaaagtattgtccccggctttcgttaagcgatctccagccctggcccgccggtgtgcgggcgcaggcggtatcgccggacggcaagctgattgacgattttctgtttgtcaccaccccgcgcacgatccacacctgcaatgcgccctccccggcagcgacatcagcaattcctattggtgcgcatattgtcagcaaggtacaaacgctgttggcaagccagagtaaccccggacgcacgctgcgagcggcacgtagtgtggatgccttacacgccgcgtttaatcaataacctttgaaaacaggatgtagcgatgaaactgaacgacagtaacttattccgccagcaggcgttgattaacggggaatggctggacgccaacaatggtgaagtcatcgacgtcaccaatccggcgaacggcgacaagctgggtagcgtgccgaaaatgggcgctgatgaaactcgcgccgctatcgacgccgccaaccgcgccctgcccgtctggcgtgcgctcaccgccaaagaacgcgccaacattctgcgcaactggttcaatttgatgatggagcatcaggacgatttagcgcgcctgatgaccctcgaacagggtaaaccgctggctgaagcgaaaggcgaaatcagctacgccgcctcttttattgagtggtttgccgaagaaggcaaacgcatttatggcgacaccattcccggtcatcaggccgataagcgcctgattgtgatcaagcagccgattggcgttacagcggccatcacgccgtggaactttccggcggcaatgattacccgcaaagccggtccggcgctggcggcaggctgcaccatggtgctgaagcccgccagtcagacgccgttctctgcgctggcgctggcggagctggcgatccgcgcgggcattccggctggcgtgtttaacgtggtcaccggttcggcgggcgcggtgggtaatgaactgaccagcaacccgctggtacgcaaactgtcgtttaccggctcgaccgaaattggccgccagttaatggaacagtgcgcgaaagacatcaaaaaagtgtcgctggagctgggcggcaacgcgccgtttatcgtctttgacgatgccgatctcgataaagccgtagaaggcgcactggcctcgaaattccgcaacgccgggcaaacctgcgtctgcgccaaccgtttatacgtgcaggacggcgtgtatgaccgctttgccgaaaaattgcagcaggcggtgagcaaactgcatatcggcgacgggctggataaaggcgtcaccatcgggccgctgatcgatgaaaaagcggtagcaaaagtggaagagcatattgccgatgcgctggaaaaaggcgcgcgcgtagtttgcggcggtaaagcacatgaacgcggcggcaacttcttccagcccaccattctggtggacgtgccggccaacgccaaagtgtcgaaagaagagaccttcggccccctcgccccgctgttccgttttaaagatgaagccgatgtgatcgcgcaagccaatgacaccgagtttggccttgccgcctatttntatgcccgtgatttaagtcgcgtcttccgcgtgggcgaggcgctggagtacggcatcgtcggcatcaataccgggattatttccaatgaagtggccccgttcggcggcattaaagcctcgggtctgggtcgtgaaggttcgaagtatggcatcgaagattacttagaaatcaaatatatgtgcatcggtctttaactggagaacgcgaatgagcagcantaaagagttaatgcagcgccgcagtnaggcaattcctcgtggcgttgggcaaattcaccccattttcgctgatcgcgcggaaaactgccgggtgtgggacgttgaaggccgtgagtatcttgatttcgcgggcggcattgcggtgctcaataccgggcacctgcatccgaaagtggttgccgcggtggaagcgcagttgaaaaaactgtcgcacacctgcttccaggtgctggcttacgagccgtatctggagctgtgcgagattatgaatcagaaggtgccgggcgattttgccaagaaaacgctgctggttacgaccggttccgaagcggtggaaaacgcggtgaaaatcgcccgcgctgccaccaaacgtagcggcaccatcgcttttagcggcgcgtatcacgggcgcacgcattacacgctggcgctgaccggcaaggtgaatccgtactctgcgggcatgggcctgatgccagggcacgtttatcgcgcgctttatccttgcccactgcacggcatcagtgaagatgatgctatcgccagtatccaccgaatttttaaaaatgatgctgcgccggaagatatcgccgccatcgtgattgagccggttcagggcgaaggcggtttctacgccgcgacgcctgcgtttatgcagcgtttacgcgcgctgtgtgacgagcacgggatcatgctgattgccgatgaagtgcagancggcgcggggcgtaccggcacgctgtttgcgatggagcaaatgggcgtggcaccagatctcaccacctttgcgaaatcgatcgcaggcggcttcccactggcgggcgtcaccgggcgcgccgaagtgatggatgccgtcgctccaggcgggctgggtggcacctatgccggtaatccgattgcctgcgtggcggcgctggaagtgttgaaggtgttcgagcaggaaaatctgctgcagaaagccaacgatctggggcagaagttgaaagatggattgttggcgatcgccgaaaaacaccctgagatcggcgacgtacgcgggctgggggcgatgatcgccatcgagctgtttgaagacggcgatcacaacaagccggacgccaaactcaccgccgagatcgtggctcgcgcccgcgataaaggcctgattcttctctcctgcggcccgtattacaacgtgctgcgcatccttgtaccgctcaccattgaagacgctcagatccgtcagggtctggagatcatcagccagtgttttgctgaggcaaagcagtagcgccgctcctatgccggaggcgacgctgcgcgtcttgtccggcctacggggatccaggtcggataaggcgtttacgccgcatccgacaatctgtacgtgaacaggaataaatctatgttggccgggtaaggcggagccgctctccggcaaaaagaatcaataacaattatacgcgtgacccgacgcgggaaatgtcggggcgctctcccaagtgacacactttcgagaggattcaggatggggcaatcatcgcaaccacatgagttaggcggcgggctgaagtcacgccatgtcaccatgttgtctattgccggtgttatcggcgcaagtctgtttgtcggttccagcgtcgccatcgccgaagcgnnnnnnnnngtattactggcctatctgttcgccgggctactggtggttatgattatgcggatgttggcggaaatggcggttgccacgcccgataccggttcgttttccacctatgccgataaagctattggtcgttgggcgggttataccatcggctggttgtactggtggttttgggtactggttatcccgctggaagccaacatcgccgccatgatcctgcactcatgggttccaggcattcccatctggttattttccctcgtcattacccttgccttaactggcagtaatttattaagcgttaaaaactacggcgaatttgagttctggctggcgctgtgcaaagtcatcgctatcctggcctttattttccttggtgcagtcgcaattagcggtttttacccgtatgccgacgtgagcgggatctcaagattgtgggatagcggcggctttatgcccaacggcttcggtgcggtattaagcgcgatgttgatcaccatgttctcgtttatgggcgcagaaattgtcaccattgccgccgcggaatccgacacgccggaaaaacatattgtccgcgctaccaactcggttatctggcgtatttctatcttctatttgtgctctatntttgtcgtagtggcgttaataccgtggaatatgccggggctgaaagccgttggatcttatcgctcggttctggaattgctcaatataccccatgcgaaattaatcatggactgcgtgatattactttccgtaaccagttgcctgaactcggcgctgtataccgcgtcaaggatgctctactccttaagccgtcgcggtgatgcgcccgcggtaatgggcaaaatcaaccgcagtaaaaccccgtatgtggcggtgttactctccaccggagcggnatttttaacggtcgtggtgaactattacgcacctgcgaaagtgtttaaattcctgatcgacagctccggtgctatcgccctgctggtttatttagtcatcgccgtttcacagttgcggatgcgtaaaattctgcgagcagaaggaagcgaaattcgcttgcgcatgtggctttacccgtggctcacctggctggtaatcggctttattacctttgtgttggtggtgatgttattccgcccggcgcaacagttagaagtgatctctaccggcttattagcgatagggattatctgtaccgtgccgattatggcgcgctggaaaaagctggtattgtggcaaaaaacacccgttcataatacgcgctgataatgatcaggagtcacaccatgaccattacgtctctggatggctatcgctggctgaagaacgatattattcgcggtaattttcaaccggatgaaaaattacgaatgagtttgctgacatcgcgttatgcacttggcgttgggccgttacgggaagctctttcgcaactggtggcggaacggctggtcacggtggtgaatcaaaaagggtatcgggtggcgtctatgtcagagcaggagctgctcgatattttcgacgcccgcgccaatatggaagcgatgttagtgagtctggcgattgcccgcggtggcgatgagtgggaggcagacgttctcgcaaaagcgcatctgctgagtaagcttgaggcctgtgacgccagcgagaaaatgcttgatgagtgggatctgcgtcatcaggcgtttcatactgcaattgtggcgggctgtggttctcactatttgctgcaaatgcgtgaacggttgtttgatctggcggcgcgttatcgatttatctggctgcggcgaacggtgctttcggtggaaatgctggaggataaacacgatcagcaccagaccctgactgcggcggtactggcgcgagataccgcgcncgccagtgagttaatgcgccagcatttactgacgccaattcccattatccagcaggcgatggctggcaattaactactcttccggaatacgcaacacttgccccggataaattttatccgggctttttagcatcggtttattcgcttcgaagattttattgtacagattagcgttaccgtagacctgtttggaaatggcactcagagtgtcgccagacttaacggtataaaactggctggcagtggctggtgtcgccgttttcacctgatcatcaacactggcaataccggaaatattccccaccgcaacaaggattttctccttcgcctcctgactcaggccgtcaccagtgaccgtcgctttgccatcggcaatttgaatgttcactttatcggcatcaggtataccggttttgctcagatgctcctgcacnttcttcgcctgatcatntttatcgtgctgacctgtaaccgcgtcccagagtttttctccggcatctttcacaaaattgaacagccccatagctacctcattcgttaacggaaacactcagaaagtgtagcagaggaacgnnnnnnnnnnacgccgcggggatgagcacaggtttaatcgcgggtttgcacccagaacgcgtgaatcaaaccggggatatacccaagcagtgtcaacagaatattaataatgaacgcccaaccgaaccctttaccgagcagcacgccgagcggcggcagaatgatggtgatgacgattctccagaaacccatatgtactccctataagaaaattactcattgtttaaaaagagattttatnnnnnnnnnnnnnnnnnnntagcggaggctgccagtttcagcttacgcttttactctcatttacgctgctgaggctggtatatgttgcatttttagtttagagtttacttaatttagaaaatacttaaataactatgaccgaactcacgcaattacaggccagtgctgaacaggcagcggccttattgaaagcaatgagccaccctaaacggttgctgattctgtgcatgcttagcggttcccccggcaccagcgcgggagagctgacgcgcattaccggactgagcgcctctgcgacatcacagcatctcgctcgtatgcgggacgaagggcttatcaacagccaacgggatgcccaacgcattctatattccattaaaaatgaggcggtaaatgccattatcgccaccctgaaaaatgtctattgtccgtaaggagtcactatggctttgacaaccatttcgccgcatgatgcacaagaattaatcgcacgcggcgcaaagttaatcgatattcgtgacgctgatgaatatcttcgtgaacatattcctgaagcagatctggctccattatccgtgctggaacagtcaggtctcccggctaaattacgtcgcgagcaaattatattccactgccaggcaggtaaacgcaccagtaataacgccgataaattagcagcgattgccgcccccgcagaaatctttttactcgaagatgggattgatggctggaaaaaagcaggattaccagtagcggtaaataaatctcaacccttgccgttaatgcgccaggtgcagatcgctgcgggtggtttaatattaatcggcgttatactgggttataccgtaaatagcggtttcttcttattaagcggctttgttggtgccgggttactgtttgcaggaattagcggtttttgtgggatggcaaggttgttagataagatgccgtggaaccaatgagcttgagaagcgacgccggacgcgccctagcagcgacatccggcctcagtaattagatcaggaaatcgtcgagagatttaccttctgccagcgcctgagcgattggcttcggtgtacggccctgaccggtccaggttttagtttcaccgttaacatcggtgaatttatatttcgccggacgcggctggcgttttttaccagcacgtggtgcagcagcagagctattacccaataactcttccgggttaattccgtcagctttcatcagctccagccaggtgctaattttttcctggcgctctgccagttcacgctgctgctgttcttcttcttcacgtctttctttagtgacaaccctgaatttttcgagcatttcttcaagaacgtcaatggagaattcgcgagccatcgcacggagggtgcgaatgttatttaaactttgtaacattacggacataataaagaaaaccttttaacgccaaaacaaaaaagtatttcgtcgcgtagtgtaagcgatcacttattatatttccacaaaatttaatctatttacagtcctgcgcgagattatttcagctgttattttctgaaactctcagaataatttcaagattatatattagccattttgatgagtaatttagattattggtgaacagaacggcgctctctgctcgctaattccgcaagcctgacaaaaccaaagtgaataaaaatgcaatataacagaataaaataaaacacccctcactggtgctttctgctgttaatgtacattttctggcataaaaaatgctgtaaatgacccggtcacgacatacaccgaattctctacgcttatagcgttacctcacccccaaactttcattagtgaaattaaaggaaaggtcatatcaaattgatttaattgaaaataaatcatatcggcatgtaaaaacccacaatgcacaaaaaacgagccgttacggaatattttatctacaaaaactgactaaataaaaatttttcactaattgattagtcatagccagcgatatacgctatgcgaaaatgcagatggtaatgagatccactgctttcatctccattaacatcccattacgcttttattaaggagcattagcatgttctcaccgcagtcacgcttgcgtcatgcagttgcagatacgttcgcgatggttgtttactgttctgtcgtgaacatgtgtattgaagttttcctctccggaatgagcttcgaacagtctttttattccagattggtagcgattccggtgaacatcttaattgcatggccatacggtatgtaccgcgatctgtttatgcgcgcggcacgcaaagttagcccgtcgggctggataaaaaatctggcggatatcctggcttatgtgacgttccagtcaccggtgtatgtggcgatcttgttagtggtgggcgcagactggcatcagattatggcggcggtcagttcaaacatcgttgtttcgatgttgatgggggcggtttatggctacttcctcgattattgccgccgactgtttaaagtcagccgttaccagcaggtaaaagcctgactcttcttttcgngactggcatcgccagtcgcgtctttaactggcttcgccaaataaaccattcaaataacgttcaagcgcaacacgcgaactaaagccatgcgggataccgtaatgctcgtgtcgctcgcctgctaaatagagcggaaattgctggtaatgatcgcaagttttaatatcggaagcgggttcagccagtgtcgaactgcgttcttttaatgttggatgaattaccagagcggtacgtcccattcgcgcttcgcgattaacatagacataattttccccacggcggtaaccatacgctttctgggttaccacatcgacagtaaaaccgactttttcaagtacgcgcgccacctcgtctggtcgtaaatacatatttgatcctcgttattatcaaccgcgggcctaccttacctgattgcgcattcacaacgctttcagaanagtccataaagccgcgatgaacctcagttaagaaaattatggtctacactgaaaattacatcgaattctaatgggggatcatatgtttaaccgaccgaaccgcaacgacgttgatgatggcgtgcaggatatccagaatgatgtcaatcaattagctgacagcctcgaatctgtattgaagtcctggggcagcgacgccaaaggggaagctgaagccgcacgcagtaaagctcaggcattgctgaaagaaaccagggcgcgaatgcatggtcgtactcgcgtccagcaagccgcgcgcgatgccgtaggctgcgcggattcttttgttcgtgaaagaccctggtgtagtgtgggaactgctgctgtggtaggtatttttatcggtgcgttgttgagcatgcgtaaatcgtagtgagacgatgacaagcagtagtctgacttctgaaaagtactcagtgcgtcaacgccttgtccgcctacaggcctgaaaaacatagcgcatcaggggtttttgccctggtcaccagtcttataggaccccnaagcctggcttcggggttattaatttanagcactgcgcaattgctgtgctacctgtcgcgccatactttcgctaacgatattcgtaaacgagagcaataatcctccgtcctcgcttgagcggatacgccagtcgctaagtgcctgtacggcaagaccagcagcattggctttatgcacgaatgtcacgtcattacctgctagtttgatcaccatctggataccgcctttttgcggcacaacctgaaatccctgctgcgtaagtgcctgctcaatccactgccgtcgctgggcataatgctggcgcattttcttcagatgccgccagaaatgcccctcacggatgaaatctgccagtgtgttctgccacagtacgggtacagcacatggttccagtgacgcctgctgccggaattgcgaaatctgctccaccggcaccaccagccacgcacagcgcaatgcaggaaatagcgctttgctgaatgttccggcataaatcacccgctgcggcgcgtcgagactttttagtgccggtaacggcttaccgtgatagcgaaactcactgtcgtaatcatcttcaataatccatgcctgactacgctctgcccattccagtatctgatacctacgcgctaaagagagtgccacacccagcgggctttggtgtgccggagtaatcagggcaaaacgcgcatcaggataattttgtattccgcttgtgacatccagtccgttgtcatcaaccggcacaggtaaaatttccacaccgtggcgagtgacaatcgggcgaatcagcggaaagccgggatcttccatccacatcccgtctcccggttgcgccagancgtgcagaattaaagccattgaggccgcataaccgtgagtgataaagacctgctctggctgacaatcaatcccacgtgaaacgcgtaaataatcaacaatagcctcgcgcaaggccgcctcgccgcanacatcgcctaatgccaaatcaaagcgcgtctgggtacgcagacggcggcccatcacccgcgcccacaattcacgcggaaaaagatcaagtgcaggtagccccatctgaaaaggcagcggctgctgactttcaccagcaaaagccacgacatccacagcagactgttgcggatgtatctgctcactgacaaaggtacccgcctgtccccgcctgaccagccatccctgcgccaccagctcagcataagcattttcgacagtggatcgagagacacccagctcctgcgaccaggtacggctcgaaggtagccttgcgccaggtttcagttttccttgctcgataaccgtttttaactgacgggcgatatcctgataacgtggcatatggtctgcttttttaggtaatttatggctctctttagcagtccattatagtgctacattgcgggcgttaataagaggagaaactgtatgactacattacgtcagccttactacgaacttagcccggcagtgtataacgcactggtgcaggccaaaacggcactggaaaatagcacgctggataccacgttgatggagttaatttatttgcgcgtctcgcaaatcaacggctgcgcattttgtctggagatgcacagcaaagcattgcgcaaatccggtgtgccacaacacaaactggacgccctggcaggctggcgcgtaagccatcattttgatgaacgcgagcgagcggcgctggcatgggcggaatctgtgaccgatattgccagaacccatgcggaagacgaggtttatcagcctttgcttgagcatttcagcgcagcagaaatcagcgacttaacgtttgccatcgggctgatgaattgttttaaccgtctggccgtttccatgcggatgtaatttgctgttgccgggtatgcgcccggcaaaaaaacacaaaatctcctaccccgttgagccattcaccggtggcgtaatcaatctaaaattaccatatcttgtgtggttgaatcttttttcaactacatctagtatctctgtatcaacagagagacaacccgacgcgtatcatcgcgccgtatcttcattttaaacggaaatacgaatcatgcgcattactatttacactcgtaacgattgcgttcagtgccacgccaccaaacgggcgatggaaaaccggggctttgattttgaaatgattaatgtcgatcgcgttcctgaagcggcagaagcgttgcgtgctcagggctttcgtcagttgccggtagtgattgctggcgatcttagctggtctggtttccgtccggacatgattaaccgtctgcatccagcgccacacgcggccagtgcatgagccagctcgtctacttctccagcagctccgaaaacacgcagcgttttatcgaacgtttaggtctgcccgcggtgcgcatccnnctcaatgagcgggaacggattcaggtagacgagccttacatcctgatcgtgccctcttacggcggcggcggtacggctggcgcggtgccacgacaggtaattcgctttttaaacgacgagcacaaccgggcgttgcttcgcggcgttattgcttcgggtaatcgcaactttggtgaggcgtatggccgcgccggagatgtgattgcccggaaatgcggcgtgccgtggctgtaccgttttgaactcatgggtacgcaaagcgatatcgaaaacgttcgtaaaggagtaaccgaattttggcaacgacaaccgcagaatgcctgacgcagaaaacgatggattaccacgcgctgaatgcgatgcttaacctctacgatagcgcaggtcgcattcagttcgataaagaccgccaggccgttgacgcctttatggcgacgcatgtgcgtccgaacagtgtgaccttcagtagccagcagcagcgcctgaactggctggtcaacgaaggttactatgatgaaagcgttcttaatcgctactctcgcgactttgtcattacgctgtttgcccacgcacacaccagcggttttcgtttccagacattcctcggggcatggaagttttacaccagctatacgttgaagacattcgacggtaaacgttatctggaagattttgccgatcgagtcacgatggtggcgctgacgctggcacaaggcgatgagacgctggcgttgcaactgacagatgaaatgctgtcaggacgctttcagccagccacgccaacattcctcaactgcggtaagcagcagcgcggcgaactggtttcctgttttttgctgcgtattgaagacaatatggagtcgattggtcgggcggtaaattccgcactgcaactgtcgaaacgcggcggcggcgtagcatttttgctgtcgaatctgcgggaagcgggcgcgccaattaaacgtattgaaaatcaatcttctggcgtaattccggtgatgaaaatgctggaagacgcattttcctatgccaaccaactcggcgctcgtcagggggctggtgcagtctatttacatgctcatcatcccgatattctgcgttttctcgacacgaaacgggaaaatgccgacgaaaaaatccgcattaaaacactgtcgcttggcgtggtgatcccggatatcactttccatctggcaaaagagaatgcgcagatggcgctgttttcgccttatgacgtagagcgagtttatggcaagccgtttgccgatgtggccatcagccaacactatgacgaactggttgccgatgaacgcattcgcaaaaaatacctcaacgcccgtgatttcttccagcgactggcagaaatccagtttgagtccggctatccctacatcatgtatgaagacacggtaaaccgtgctaaccctgtcgccgggcgcataaatatgagtaatctctgctcagaaattttgcaggttaacagcgcctcagagtatgacgagaatctcgactatgcccgcacaggccatgatatctcctgcaatttaggttcgttgaatattgcgcacaccatggattcccccgattttgcccgcacggtagagactgccgtgcgcggtttaacggcagtatcagatatgagtcatatccgcagcgtgccgtccatcgaagccggaaatgccgcctcgcacgccatcggactggggcagatgaatttacacggctatctggcgcgagaaggcatcgcttatggttcgccggaagcactggatttcaccaatctctatttctatgccatcacctggcacgcactgcgtacctcgatgttgctggcacgcgaacgcggtgaaaccttcgccgggttcaaacagtcacgctatgccagtggtgaatattttagccaatatctgcaagggaactggcagccgaaaacggggaaagttggcgaactgtttgcccgtagcggtattacgttacctacccgtgagatgtgggcgcaactgcgcgacgacgtgatgcgctacggcatttacaaccagaatcttcaggcggtgccgccaacaggttctatctcttatatcaaccatgctacgtcgagtattcatccgattgtggcgaaagtagagatacgcaaagagggcaaaacaggacgcgtttactaccctgccccgtttatgactaacgagaatctggcgctgtatcaggacgcttacgaaattggcgcagaaaagatcatcgacacctacgcggaagcgactcgccatgtcgatcaggggctgtcactgacgctgtttttccccgataccgccaccactcgcgatatcaacaaagcgcagatttacgcctggcgcaaaggtatcaaaacgctctattacatccggctgcgtcagatggcgctggaaggcactgaaattgaaggctgcgtctcctgtgcactttaaggaatatctatgaaactctcacgtatcagcgccatcaactggaacaagatatctgacgataaagatctggaggtgtggaatcgcctgaccagcaatttctggctaccagaaaaggtgccgctgtcgaacgatattcctgcctggcagacattaactgtcgtagaacaacaactgacgatgcgcgtttttactggcctgacgctgctcgacacgctgcaaaatgttatcggcgcgccttcgctgatgcccgatgcactcacgcctcatgaagaagcggtattatcgaatatcagctttatggaagcggttcatgcccgctcttacagttcgattttctcgacgctgtgccagaccaaagatgtcgatgccgcctacgcctggagtgaagaaaacgcgccgttgcagcgaaaagcacagattattcagcaacattaccgcggtgatgatccgctgaaaaagaaaatcgccagtgtgtttcttgaatcttttttgttctattccggtttctggctgccgatgtatttttccagccgcggaaagctgaccaataccgcggacctgatccgtctgattatccgcgatgaagcagtccacggttactacataggctataaatatcagaaaaacatggaaaagatatctctgggacaacgtgaagagttgaagagtttcgccttcgatttgttgctggaactctacgacaacgagttgcaatacaccgatgagctgtacgccgaaaccccgtgggctgacgatgtgaaagcgtttctctgttacaacgccaataaggctttgatgaatctgggctacgaaccgttatttcccgcagaaatggcggaagtgaatccggcaatcctcgccgcgctttcgccgaatgccgatgaaaatcacgatttcttttccggttcaggctcctcttatgtgatggggaaagcggttgaaacagaagatgaagactggaatttctgagggtgttattttcaaaaatatcactacccgcgacagggaaataattcccgccaaatagctttttatcacgcaaatattttgtggtgatctacactgatactctgttgcattattcgcctgaaaccacaatattcaggcgttttttcgctatctttgacaaaaaatatcaacttttctcgatttgctctcagcccttatatcacgggaaattccggcgatttgctcgcatcaatattcatgccacatttgccatcaggggttgcctcagattctcagtatgttagggtagaaaaaagtgactatttccattgggtaatatatcgacataaacaaataacaggaatctttctattgcatggcaattaaattagaaattaaaaatctttataaaatatttggtgagcatccacagcgagcgttcaaatatatcgaacaaggactttcaaaagaacaaattctggaaaaaactgggctatcgcttggcgtaaaagacgccagtctggccattgaagaaggcgagatatttgtcatcatgggattatccggctcgggtaaatccacaatggtacgccttctcaatcgcctgattgaacccacccgcgggcaagtactgattgatggtgtggatattgccaaaatatccgacgccgaactccgtgaggtgcgcagaaaaaagattgcgatggtcttccagtcctttgccttaatgccgcatatgaccgtgctggacaatactgcgtttggtatggaattggccggaattaatgccgaagaacgccgggaaaaagcccttgatgcactgcgtcaggtcgggctggaaaattatgcccacagctacccggatgaactctctggcgggatgcgtcaacgtgtgggattagcccgcgcgttagcgattaatccggatattttattaatggatgaagccttctcggcgctcgatccattaattcgcaccgagatgcaggatgagctggtaaaattacaggcgaaacatcagcgcaccattgtctttatttcccacgatctcgatgaagccatgcgtattggcgaccgaattgccattatgcaaaatggtgaagtggtacaggtcggcacaccggatgaaattctcaataatccggcgaatgattatgtccgtaccttcttccgtggcgttgatattagtcaggtattcagtgcgaaagatattgcccgccggacaccgaatggcttaattcgtaaaacccctggcttcggcccacgttcggcactgaaattattgcaggatgaagatcgtgaatatggctacgttatcgaacgcggtaataagtttgtcggcgcagtctccatcgattcgcttaaaaccgcgttaacgcagcagcaaggtcttgatgcggcgctgattgatgcgccgttagcagtcgatgcacaaacgcctcttagcgagttgctctctcatgtcggacaggctccctgtgcggtgcccgtggtcgacgaggaccaacagtatgtcggcatcatttcgaaaggaatgctgctgcgngctttagatcgtgagggggtaaataatggctgatcaaaataatccgtgggataccacgccagcggcggacagtgccgcgcaatccgcagacgcctggggtacaccggcgactgcaccgactgacggcggtggtgctgactggctgaccagtacgcctgcgccaaacgtcgagcattttaatattctcgatccgttccataaaacgctgatcccgctcgacagttgggtcactgaagggatcgactgggtcgttacccatttccgtcccgtcttccagggcgtgcgcgttccggttgattatatcctcaacggtttccagcaattgctgctgggtatgcccgcaccggtggcgattatcgttttcgctctcatcgcctggcagatttccggggtcggaatgggcgtggcgacgctggtttcgctgattgccatcggcgcaatcggtgcctggtcgcaggcaatggttactctggcgctggtgttaaccgccctgctgttctgtatcgtcatcggtttgccgttggggatctggctggcgagaagtccgcgagcggcgaaaattattcgtccactgcttgatgccatgcagaccacgccagcgtttgtttatctggtgccaatcgtcatgctatttggtatcggtaacgtgccgggcgtggtggtgacgatcatctttgctctgccgccgattatccgtctgaccattctggggattaaccaggttccggcggatctgattgaagcctcgcgctcattcggtgccagcccgcgccagatgctgttcaaagttcagttaccgctggcgatgccgaccattatggcgggcgttaaccagacgctgatgctggccctttctatggtggtcatcgcctcgatgattgccgtcggcgggttgggtcagatggtacttcgtggtatcggtcgtctggatatggggcttgccaccgttggcggcgtcgggattgtgatcctcgccattatcctcgatcgtctgacgcaggccgttgggcgcgactcacgcagtcgcggcaaccgtcgctggtacaccactggccctgtcggtctgctgacccgcccattcattaagtaactctgcacttgcccggtgacgccgggcatatcaccctgccaaaaaaaggaataacaatgcgacatagcgtactttttgcgacagcgtttgccacgcttatctctacacaaacttttgntgccgacctgccgggcaaaggcattactgttaatccggttcagagcaccatcaccgaagaaactttccagacgctgctggtcagccgcncgctggagaaattaggttataccgtcaataaacccagcgaagtggattacaacgttggctacacctcgcttgcttccggcgatgcaacnttcaccgccgtgaantggacgccactgcatgacaacatgtacgaagctgccggtggcgataagaaattttatcgtgaangggtatttgttaacggcgcggcacagggttacctgatcgataagaaaaccgccgaccagtacaaaatcaccaacatcgcacaactgaaagatccgaagatcgccaaactgttcgataccaacggcgacggaaaagcggatttaaccggttgtaaccctggctggggctgcgaaggtgcgatcaaccaccagcttgccgcgtatgaactgaccaataccgtgacgcataatcaggggaactacgcggcgatgatggccgacaccatcagtcgttacaaagagggcaaaccggtgttttactacacctggacgccgtactgggtgagtaatgagctgaagccaggcaaagatgtggtctggttgcaggtgccgttctctgcactgccgggcgataaaaatgccgataccaaactgccgaatggcgcgaattacggcttcccggtcagcaccatgcatatcgttgccaataaagcctgggccgagaaaaacccggcagcagcgaaactgtttgccattatgcagttgccagtggcagatattaacgcccagaacgccattatgcatgacggcaaagcctcagaaggcgatattcagggccacgttgatggctggatcaaagcccaccagcaacagttcgatggctgggtgaatgaggcgttggcagcgcagaagtaatttttattcgggcggataaggcgtttacgccgcatccgccgttctgtacacaatgcctgatgcgacgctggcgcgtcttatcatgcctacaaaccacaccgcacatttcaacaatctatctttcatcccatattcatcaacatccgctattattgatttccagcttaatcatcacctgatgaacaaaaataatgaccaaacctaatcatgagcttagcccggcgctaatcgtgctgatgtctatcgccaccggtctggcggtcgccagcaactattacgcccagccattgctcgacaccatcgcgcgtaacttttccctttccgccagttcggcaggctttattgttaccgccgcgcagttgggctatgccgccggtctgctgtttcttgttcccctcggtgatatgtttgaacgccgccgcctgattgtctcgatgaccttactggcagcgggcggtatgttaatcactgccagcagtcagtcactggcgatgatgatcctcggtacggcattaaccggtttattctcagtcgtggcacaaattctggttccgctggcagcgacgctggcttcaccggataaacgcggcaaagtggttggcaccattatgagcggtctgctgttggggatattgctggcacgaaccgttgccgggttactggcaaacctcggcggctggcgcaccgtcttttgggttgcctcggtgttaatggctctgatggcgctggcattatggcgtggtctgccacaaatgaaatcagaaacccacctcaactacccacagttgttgggttccgttttcagcatgtttatcagcaataagatcctgcgcacccgcgcgttgctgggctgcctgacctttgccaacttcagcattntctggacctcaatggcctttttgcttgccgctccaccttttaactacagcgatggtgtaattggtctgtttgggcttgcgggagctgccggagcgttgggcgctcgtccggcgggcggttttgccgacaagggcaaatcgcaccacaccacaactttcggtctgcttctgctgttactttcatggctggcaatctggtttggtcacacttccgtactggcgttgattatcggcattctggtgctggacctcaccgtacagggcgtgcatatcactaaccagacggtaatttatcgaatacatcctgatgcgcgtaatcgcctgaccgcaggttacatgaccagctactttattggcggtgccgccggttcgctaatttcagcctcagcctggcaacatggcggttcggctggcgtttgtctggctggcgcgacgattgccctggttaacttactggtctggtggcgaggttttcatcgtcaggaagccgcaaattaagcaatcagcaaccgttttcgtggctttacacttataagggtgttaagaagcccatcagtctgataaggttaagatattcattcagtctatttataatattaacaatcgttaagcgtacactctatggaaagccctactccacagcctgctcctggttcggcgaccttcatggaaggatgcaaagacagtttaccgattgttattagttatattccggtggcctttgcgttcggtctgaatgcgacccgtctgggattctctcctctcgaaagcgtttttttctcctgcatcatttatgcaggcgcgagccagttcgtcattaccgcgatgctggcagcagggagtagtttgtgggttgctgcactgaccgtcatggcaatggatgttcgccatgttttgtatggcccgtcactgcgtagccgtattattcagcgtctgcaaaaatcgaaaaccgccctatgggcgtttggcctgacggatgaggtttttgccgccgccaccgcaaaactggtacgcaataatcgccgctggagcgagaactggatgatcggcattgccttcagttcatggtcatcgtgggtatttggtacggtaataggggcattctccggcagcggcttgctgcaaggttatcccgccgttgaagctgcattaggttttatgcttccggcactctttatgagtttcctgctcgcctcttttcagcgcaaacaatctctttgcgttaccgcagcgttagttggtgcccttgcaggcgtaacgctattttctattcccgtcgccattctggcaggcattgtctgtggctgcctcactgcgttaatccaggcattctggcaaggagcgcccgatgagctatgangttctgctgcttgggttactggttggcgcggcgaattattgcttccgctatttgccgctgcgcctgcgtgtgggtaatgcccgcccaaccaaacgtggcgcggtaggtattttgctcgacaccattggcatcgcctcgatatgcgctctgctggttgtctctaccgcaccagaagtgatgcacgatacacgccgtttcgtgcccacgctggtcggcttcgcggtactgggtgccagtttctataaaacacgcagcattatcatcccaacactgcttantgcgctggcctatgggctcgcctggaaagtgatggcgattatataacccacaagaatcatttttctaaaacaatacatttactttatttgtcactgtcgttactatatcggctgaaattaatgaggtcatacccaaatggatagttcgtttacgcccattgaacaaatgctaaaatttcgcgccagccgccacgaagattttccttatcaggagatccttctgantcgtctttgcatgcatatgcaaagcaagctgctggagaaccgcaataaaatgctgaaggctcaggggattaacgagacgttgtttatggcgttgattacgctggagtctcaggaaaaccacagtattcagccttctgaattaagttgtgctcttggatcatcccgtaccaacgcgacgcgtattgccgatgaactggaaaaacgcggttggatcgaacgtcgtgaaagcgataacgatcgccgctgcctgcatctgcaattaacggaaaaaggtcacgagtttttgcgcgaggttttaccaccgcagcataactgcctgcatcaactctggtccgcgctcagcacaacagaaaaagaccagctcgagcaaatcacccgcaaattgctctcccgtctcgaccagatggaacaagacggtgtggttctcgaagcgatgagctaacgcgtcatctcgctcaaaaatccagatttataaaagaaaaaatgaccggccagcatcgcaacatgctggcctttttggcaagcaggtcggctcagccgatgagttaagaagatcgtggagaacaatatgagcgcaaatgcggagactcaaaccccgcagcaaccggtaaagaagagcggcaaacgtaagcgtctgctcctccttctcaccttgctctttataattattgccgtagcgatagggatttattggtttttggtactgcgtcacttcgaagaaaccgatgacgcatacgtggcagggaatcaaattcaaattatgtctcaggtgtctggcagcgtgacgaaagtctgggccgataacaccgattttgtaaaagaaggcgacgtgctggtcactctcgacccgacagatgctcgccaggcgtttgaaaaagccaaaactgcactggcttccagcgttcgccaaacccaccagcagatgattaacagcaagcagttgcaggcgaatattgaggtgcaaaaaatcgccctcgcgaaagcacaaagcgactacaaccgccgtgtgccgctgggcaatgccaacctgattggtcgcgaagagctgcaacacgcccgcgacgccgttaccagtgcccaggcgcaactggacgtcgcgattcaacaatacaatgccaatcaggcgatgattctggggactaaactggaagatcagcctgccgtgcaacaggctgccaccgaagtacgtaacgcctggctggcgctggagcgtactcgtattgtcagtccgatgaccggttatgtctcccgccgcgcggtacagcctggggcgcaaattagcccaacgacgccgctgatggcggtcgttccagccaccaatatgtgggtggatgccaactttaaagagacgcagattgccaatatgcgtatcggtcagccggtcactatcaccaccgatatttacggcgatgatgtgaaatacaccggtaaagtggttggtctggatatgggcacaggtagcgcgttctcactgcttccggcgcaaaatgcgaccggtaactggatcaaagtcgttcagcgtctgcctgtgcgtatcgaactggaccagaaacagctggagcaatacccgctgcgtatcggtttatccacgctggtgagcgtcaataccactaacagtgacggtcaggtactggcaaataaagtacgttccactccggtagcggtaagcaccgcgcgtgaaatcagcctggcacctgtcaataaactgatcgacgatatcgtaaaagctaacgctggctaatccagaggtgcgtgtgatgcaacagcaaaaaccgctggaaggcgcgcaactggtcattatgacgattgcgctgtcactagcgacattcatgcaggtgctggactccaccattgctaacgtggcgatccccactatcgccgggaatcttggctcatcgctcagccagggaacgtgggtaatcacttctttcggggtggcgaatgccatctcgatcccgcttaccggctggctggcaaagcgcgtcggggaagtgaaactgttcctctggtcaaccatcgcctttgctattgcgtcgtgggcgtgtggtgtctccagcagcctgaatatgctgatcttcttccgcgtgattcaggggattgtcgccgggccgttgatcccgctttcgcaaagtctattgctgaataattacccgccagccaaacgctcaatcgcgctggcgttgtggtcgatgacggtgattgtcgcgccaattnnnngcccaannnnnggcggatatatcagcgataattaccactggggctggatattcttcatcaacgtgccgattggcgtggcggtggtgttgatgacactgcaaactctgcgcggacgtgaaacccgcaccgaacggcggcggattgatgccgtggggctggcactgctggttattggtatcggcagcctgcagattatgctcgaccncggtaaagagctggactggttttcatcacaggaaattatcatccttaccgtggtggcggtggtggctatctgcttcctgatcgtctgggagctgaccgacgataacccgatagtcgatctgtcgttgtttaagtcgcgcaacttcaccatcggctgtttgtgtatcagcctcgcgtatatgctctacttcggcgcgattgttctgctgccgcagttgttgcaggaggtctacggttacacggcgacctgggcaggtttggcctctgcgccggtagggattattccagtgatcctgtcgccgattatcggccgcttcgcgcataaactggatatgcgccgactggtaaccttcanctttattatgtatgccgtctgcttctactggcgtgcctatacctttgaaccaggtatggattttggcgcgtcggcctggccgcagtttatccaggggtttgcggtggcctgcttctttatgccgctgaccaccattacgctgtctggtttgccaccggaacgactggcggcggcatcgagcctctccaactttacgcgtacgctggcggggtctatcggcacgtcgataaccacaaccatgtggaccaaccgcgagtcgatgcaccatgcgcagttgactgagtcggtaaacccgttcaacccgaatgcccaggcgatgtacagtcaactggaagggcttgggatgacacaacagcaggcatcaggctggattgcccagcagatcaccaatcaggggctgattatttccgccaatgagatcttctggatgtcggccgggatattcctcgtcttgctggggctggtgtggtttgctaaaccgccctttggcgcaggtggcggcggaggcggtgcgcactaagtacaactaagccagttcatttgaactgnnnnttttcaattaattgtgaagatagtttactgactaaatgtgcagttcctgcaacttctctttcggcagcgccagttcttcgttgctgttgatgcgcacgtcacgttccagaatgctacgcgcaatatcctgcgcttcctgcaacgagtgcatctggtaagtgccacactggtagacgttcagctccggaatctgattctgatcctgcactttcagcacgtcttccattgccgctttccagacatcagcaacacgctgctcatctggcgtaccaatcagactcatataaaaaccggtgcggcagcccattggcgagatatcgataatctctacaccattaccgttaagatggttacgcataaaaccagcaaacaggtgctccagggtatggatccctctttctggcatcacttctttgttcggcacgcagaagcgcagatcgaacacggtgattgcgtcgccatgcggggtgttcattgttttcgccacccgaactgcaggcgcttccatccgggtatgatcgactgtgaagctatctaacaacggcatttagccacctccggtaattttttnnaaaattttctgaactctttcttcccaggcgagtctgagtatatgaaagacgcgcatttgttatcatcatccctgaattcagagatgaaattttgnccactcatgagtggcctttttcttttctgtcaggcgtgtttttccagccacaccgcaaacggttcggtatctgcggcttccatttcctgctgacggcgttcagatgcctcgcgctcggctacaaaatcctcttcgcgcagaatttccagcggctcttcacgcagcagattacggtacgcttcagcaaacgctttgcctgttccgccaataccagtatcaatcatagaccttaagatacgggcagagaaagtcagatcgggattatcgaagcaggcaaccagttcatcacacactttntgatacgcttcgccgccgttaatgctatccagcgtttgcgcgacgcgtttcagatcgcggaacagatctttacccacctgcggtaacgggaactgtgcggtttcgcagccgatacccagcgtcagacccggtttgcgaccttcgaggatcacccggttccagttaacgcgtgtacaggcaagttcgctactgctcatttccggtgcatcagccagcgcacaccagaccataaacaggtcgaggaatcgcacctgctgttcatctacaccaatcggcgagaacgggttgatgtccagcgaacgcacttcaatatattcaatgccgccacgtaacagcgcatcagaaggcgactcgccgctgcgggtaacgcgttttggacgaatcggcgcgtacagttcgttttcaatctgcagcacgttgctgttgatttgcagcctcttaccgtctttatcaataccaatcttcgcgtactcttccgatggcgttttgattgcctgtttcaggcccgctatgtactcgtaaagatcgttgaaggtaataccaagattgctttgcgatttattggtatagccgagatcgctcaaacgaagagaggtcgcatacggcaggtaatacataccgcactcggttttctcaaacggcagcgacgttggtttaccttgcaggaatgaagagcatattgccggagacgcgccaaacagataaggaatgacccaaccgaagcgatagtagttgcgaataacgcggaaataacccgcagagattttctctttagcatcagcgcccgaaatatcgccacacttcgcttgccagaatgccataggcaaagagaagttgtaatgcacgccggagatggtttgcatcagcgcgccgtagcgatttttcagcccttcacggtacagcgttttaaagcgtccggtgttagaagtgccgtactgcgccagttcgatgtcctgaccttctgcgatgtagcatggcatacttaacggccacatccgctcatcgcccatattgcgcgccgtataacgatgcagatcgcgcataaaggtcagcatatgttcaatatcaccatccactggtgtaatgaattccagcaatgcttccgcaaaatcggtagtaatccatttatgcgtcagtgcggaacctaatgcttcaggatgacctgttgttgccagtgtgccatcagcattaacacgcaaagtttcgcgctccagcccacgctgtatcccctttaacgcctgaggatgtttttccagccaggccagcgcctgtgatacgtccgggatcaaattgacctcccgcctgtcaaaatcgttttaattagcataactgtaatggtgaccatatgtgcaggcctacaattagtgccaccacatcatgccctgaacggtcgctgctgcaactgcaacatagcgtaacgctttaccaaggcacaaaaaaaagattaccggcccccaggagatgcgcatccatcccgctaacagacacagtaaatcgccaaccacgggcatccagcttaataatagcgtgactgcaccatagcgtttcagccagccggtagctttctcttgccagcgcgatgttttacgcaatggacagaaacgcccaaggataacgttagttaaccctccaaggctattacccattgttgctgttaaaactaaaacccagggatgactgatcccagaaagcaacattgccaccagcacgacttcggagttgccgggtaatagtgtagcgctgagaaaactactggcaaacaacgagaaaagcgataacgcttcactcacagcaagcgaacatccacagcgtccatgcctgctgcacgggccgcctgaataccgaaatcggcatcttcaaagaccacacactgcgtcggttgcacgcccatacgctgcgcgcacaacaaaaatgtgtctggcgcgggtttatggtgtttgacgtgatcggcagcgacgacggcgtcaaaataacggcgtaatcccaggtgagccagcaatgcctcagcgatggcgctttcactccccgttcctacagccattgggcgacgaccatgccaacttttcaccacttcaacaagaggaagcggctcgacactatccagcagcatacttcttactgcttctgttttttcacgcgctaacgcatgcgggtcgagatcggcctgattcagctcaataattgcctgagcaatacgccaggtgggcgatccattaagcgcaatcatcgcctgaacatcgtactgaagaccgtagtgccctaatacttcgcgccacgctttacggtgcgtaggctccgtatccaggattgtgccatccatatcaaaaattaaacctgcataacgctcgtacatggtcttctcgcaagtcgaaaaatatgacgctactttagcgtaattgcttgattttgtcgctgatggcgaaggagaagaaaattcaggaaatggataaagtagttatttagaaatgagatatttttgaaggaaattttttggagaagatggtgcatccgggaggatgactcactggcgttcgcccttcgggccgttgctaaagcaacgttatccttcctggtgcctgcggttaattccactacctcttcgatatcttcattgctgaagatttcggagaatatggtgcatccgggaggattcgaacctccgaccgctcggttcgtagccgagtactctatccagctgagctacggatgcatcgggaaaatttattttactgctgatattgatatcgctactaaagccatatcaaataagaaaatccatcttaaccatcatcactgatgattacggagaatatggtgcatccggnnnnanncnnnnnnnnnnnnnnnnnnnnnntanncgagtactctatccagctgagctacggatgcatcgggaaatttattttactgctgatattgataccgctactaaagctgtatcaagtaagagatggtgcatcnnggannannnnnnnnnnnnnnnnnnnnnnnnnnnnnnnnnnnnnnnnnnnnnntgagctacggatgcatcgggaaacttactttactgcagattttttgataccgctactaaagccgtatcaagtaagagatggtgcatnnnnnnnnnnnnnnnnnnnnganngctcggttcgtagccgagtactctatccagctgagctacggatgcaaatggcggtgaggcggggattcgaaccccggatgcagcttttgaccgcatactcccttagcaggggagcgccttcagcctctcggccacctcaccacacgcctcttacgagtgcttcgaagaacttgtttatcgctcatcgtcgctgcgtggcgcacatattactttctgagacttataagtcaaacaatttttcccacacttttatcgtttgcacacttcacgctcaattagtctgtaaaaacgtcaaaaagagtgttttatctacagaaaaacggaggtctggcagatagcagtaatgcaaaaaaatggagacttaagttgaatgaacgggagtaaagcgaaaagactatagagtgaaggagaaattttgagggtgcgtctcaccgataaagatgagacgcggaaagattagtaactggactgctgggatttttcagcctggatacgctggtagatctcttcacggtgaacagaaacttccttcggggcatttacgccaatacgtacctggttgccctttacccctaaaactgtcacggtgacctcatccccaatcatgagggtctcaccaactcgacgagtcagaatcagcattctttgctccttgaaagattaaaagagtcgggtctctctgtatcccggcattatccatcatataacgccaaaaagtaagcaatgacaaacacattacatgtaagcagtcatggcattacattctgttaaacctaagtttagccgatatacacaacttcaacctgactttatcgttgtcgatagcgttaatgcgaatgccgtgaagcgagtccacggcattgcctgacgcttatattattgcaatttcgcgctgacccagcctttcacactggctaacgctgcaggtaaggccgcagcatccggtaccaccggcttgcgccatgtcaggacgtccaccacccttgccgcccacctgctgagcgaccataccaatcagttcccctgctttcacacgatctgtgacgtccttagatacgcctgcaatcagagaaaccttaccttcggctaccgttgccagcacgataattgtcgaccccagctgattttttaaatcgtcaaccatggtacgcaacattttcggctcaacaccgctaagctcgctaaccaacagcttaacaccattaacatcaattgccttactggaaagatttgcgctctcctgtgcggcagcttgttctttaagctgttgtagttctttttctaactgacgcgtacgttccagtactgagcgcactttatccgccagattattgctatcgcctttcagcagatgcgcgacttcgcttaagcgatcgctgtctgcatgaacggtggtgatagcgccttctccggttaccgcttcgatacgacgaacgcctgcagcagtacccgattcagagatgatgcggaacagaccaatatcaccagtgcggctggcgtgagtaccgccacacagctcggtggagaaatcgcccatgctcagcacgcgtacacgctcatcatacttctcgccgaacagcgccatcgcacctttcgctttcgccgcttcgagatccatgatgttggtttcaatcggcaaattgcgacgaatctgtgcgttcaccaggtcttcgaccgcacgaatctcttccggtttcatcgcttcgttgtgtgagaagtcgaagcgcagcaccttgtcgttaaccagtgaacctttctgcgatacatgagtccccagaacctggcgcagcgcagcgtgcatcaggtgcgttgcggagtgattcagacgaatacgggcgcgacgagcctcatcaacatcagcctgcacagcgtcgcccactttcagagaacccgcagcaagtttaccgatgtgaccaatcgcctggccgtatttctgcgtatcttccaccacgaaggagaagttagcgcctttcagttcgcctttatcaccaacctgaccgccggattccgcatagaatggcgtttgatccagcacgaccacagcttcctggcctgcattgatggcatcaaccgctttaccatcaacaaacagcgcggtcactttgccgttcagttccagatggtcatagcctttaaattcagatgcactgtcaacacggatcattgcgttgtaatcggcaccaaagccgctggcttcgcgcgcccgacgacgctgctcttccattgctgcttcaaaaccagcttcgtcaactttgatgttgcgctcacgacaaacatcagccgtcaggtcaaccgggaagccataggtgtcgtacagacggaaagcagtttcaccatccagcgtatcaccagaaagttttgccagctcttcatccagcaacgccagaccgcgctccagagtacgagcaaactgctcttcttcagtcttcagcacctgctcaacctgcgcctgctggcgtttcaggtcttcacccgcagagcccataacgtcgatcagcggaccaaccagtttgtagaagaaggtttctttcgcgccgagcatattaccgtgacgcactgcgcgacgaatgatacgacgcagtacataaccacggttttcattggacggcattacgccatccgcgatcaggaacgcacaagaacgaatgtggtcagcgattacgcgcagcgatttattgctcagatcggttgcgccagtgactttcgctaccgcctggatcaacgtgcggaacaggtcgatgtcatagttagagttaacgtgttgcagcaccgcagcaatacgctccagacccataccggtatctacagacggcttcggcagcggttccatcgtgccatcggcctggcggttgaactgcatgaagacgatgttccagatctcaatgtagcggtcgccgtcttcttccggacttcccggagggccaccccaaatgtggtcgccgtgatcgtagaagatttcggtgcacgggccgcacggaccagtgtcacccatctgccagaagttgtcagatgcgtatggcgcacctttgttatcgccgatgcgaataatacgttcgcgcgggatccctacttctttttcccagatttcgtaggcttcgtcgtcgctttcatagacggtaacccacagacgctctttcggcagggcaaaccatttttcgctggtcagcagttcccatgcaaactgaatggcatcgtgtttgaaatagtcgccgaagctgaagttgcccagcatttcgaagaaggtatggtgacgcgcggtgtaaccgacgttttccaggtcgttgtgtttaccacccgcacgcacgcagcgttgggaagtggtagcgcgggaataattacgcttgtcgagcccaaggaacacatccttgaactggttcatcccggcgttggtaaacaacaaagttgggtcgttatggggtaccagggagctgctggcaactacctgatgtcccttactatggaaaaagtcgagaaacgcctgacggatctcagcggtgctcttgctcataattatcctgaaatcaagctaacgaaatatcgccaccagctccagcgtgtcttaaccgccgggctggtaactgaaaagtgggaataagataagttttcttgactgggaagtaaaataccgtatgcgttcagtcggcaaaatttcgccaannnncctggatatcttccatcagatagccacgatagagcagaaaacgctggatcttaactttttctgaaaagacagttggcaaaggttcaccatattttcgcgtcgcctgatcgcgcgccagtgcgcaccagtcgatgtcacattcacgcatcgctttttctgtcgcttcgcgggaaatacctttctgattcagttcctggcgaatacgcgcaggtccataacctttgcggctacggctggcgataaagcgcgcaacaaatcggctgtcatcgagatagccatgttcatggcaccaggcaataacgcgctcgtaatcttctgccgtagcatcaatctcttctgggccatttttgcccataatcggtgccgcgagtttacgtcgcagttcttgctcactgtgatcgcgcaccgccagaatgcgtaccgcacgatccaacaggcgagcatatgccgggcgacgggacgttgattctgtcatggcatatccttacaacttaaaaagcaaaagggccgcagatgcgacccttgtgtatcaaacaagacgattaaaaatcttcgttagtttctgctacgccttcgctatcatctacagagaaatccggcgttgagttcgggttgctcagcagcaactcacgtactttcttctcgatctctttcgcggtttccgggttatctttcagccaggcagttgcattcgctttaccctgaccgatcttctcacctttgtagctgtaccacgcgcctgctttctcgatcagcttctcttttacgcccaggtcaaccagttcgccgtagaagttgataccttcgccgtagaggatctggaattcagcctgtttaaacggcgcagcgattttgttcttcaccactttcacgcgggtttcgctacccaccacgttttcgccntctttcaccgcgccgatacgacggatgtcgagacgaacagaggcgtagaatttcagcgcgttaccaccggtagtggtttccgggttaccgaacatcacaccaattttcatacggatctggttgatgaagatcagcagcgtgttggactgcttcaggttacccgccagcttacgcatcgcctggctcatcatacgtgccgcaaggcccatgtgagagtcgccgatttcgcnttcgatttccgctttcggcgtcagtgccgccacggagtcaacgacgataacgtctactgcgccagaacgcgccagggcgtcacagatttccagtgcctgctcgccggtgtccggctgggagcacagcaggttgtcgatatcgacgcccagtttacgtgcgtagattgggtccagcgcgtgttcagcatcgataaacgcacaggttttaccttcacgctgcgctgcggcaatcacctgcaacgtcagcgtggttttaccggaagattccggtccgtagatttcgacgatacggcccatcggcagaccacctgccccaagcgcgatatccagtgaaagcgaaccggtagagatggtttccacatccatggaacggtcttcacccaggcgcatgatngagcctttaccaaattgtttctcaatctggcccagtgctgccgccaacgctttctgtttgttttcgtcgatagccatttttactcctgtcatgccgggtaataccggatagtcaatatgttctgttgaagcaattatactgtatgctcatacagtatcaagtgttttgtagaaattgttgccacaaggtctgcaatgcatacgcagtagcctgacgacgcaccgcatcacggtcgccgctgaagcattcccgcagggtaatgccttcaccgcgggcagtggcaaaagcaaaccagacggtgccgacaggcttctcttcactgccgccatccggcccggcgataccactaatagacacggcataatcagcacgagccgctttcagtgcacctatcgccatttccaccacgacgggttcactcactgcgccatgctgcgccagcgtctcttcgcgtacgccgatcatttgcgctttggcttcgttactgtaggtgacaaatccgcgttcaaaccaggcggaactgccggcaatatcggtaatcactttcgctacccaaccgccggtacaagactcagcagttgttacggttgcgccacgggctttcagcgcctgcccaacctgttcgcttaactgcatcagttcactgtcagtcatcacaacctctgtcagtcaaaaatttatgccggacaagatancactttcgtcaggaagatggtgttggcgttgcaattttacgaggaggattcagaaaaaagctgattagccagagggaagctcacgcccccctcttgcaaatagttactgcacgcgcgccagcgccacggcttgtcctaactgccagaccgccattgcgtaatgggtactgtggttataacgggtaatggtgtagaagttcggcagaccgtaccagtactggtaacctgttccaacatccagacgcagcaggctggcttgttgatggttgcccagcggctgctgtggcgttaaacctgccgcggcaagctgcgaaatgctgtacctggttttgaagccatttggcaagcctggagcctgaccgtttgccattaccgcgacctgatcgcctttcacccagccgtgcgctttgaaataattcgccacgctaccgatcgcatcaaccggatcccacaggttgatatgcccgtcgccgctgaaatctaccgcatattgtttgtaagacgacggcataaactgtccgtagcccatcgccccggcaaaggaacctttcagattgagcggatcgtcctgctcgtcgcgcgccatcagcaggaaggtttccagctcgccagagaaatactccgcgcggcgtgggtagttaaatgacagcgttgccagcgcatcgaggatgcgagttttccccatcacgcgcccccagcgggtttcaacgccgataatcccgacgataatttccggcggtacgccatacacctgccacgcgcgattcaacgcatcttcatactgattccagaaaaccacaccgttctgcacattgtccggcgtaatnnnnnnntnncgataacgcagccatgcgccgttcggacctgatggcggtttcaccgatgtggttggtgcctggttatccatcagccgcagtaccgaatccagacgtttcgcctgggagagaatttcctgcaactgctgacgatcgaaaccgtgtttgttcaccattctgtcgatgaactgctgggcattcgggttattagcgaaatcgccgcccatctgcatcacattgtgctgcggctcaagcaggaagccgccagacggcgttccggtggtcgtttcagtctcagtaggttttggcttgctgctacaggcggcaagcaacacaaaaaggggaagcaatgttacataacgacgcttgaacatgaggggtccatttaacagattcaaccaggggcaagtatggtaaagcatcacgccccgcacaaggaagcggtagtcactgcccgatacggactttacataactcaactcattctcctcgctatccttttactcaaactttcaaattaaaatnntnnnntttnntnntgcgatcaaaataacattttaaatctttcaatctgattagattaggttgccgtttggtaataaaacaataaatcctgaaggagagaacaatgatagaaaccattactcatggtgcagagtggtttatcgggctgttccaaaagggcggagaggtgtttaccgggatggtgaccggcattcttccgctgttgattagcctgctggttatcatgaacgcactgattaattttatcggtcagcatcgtattgaacgttttgctcaacgttgcgccggtaaccctgtttcccgttacctactgttaccgtgcattggcacgtttgtcttttgcaatccgatgaccttaagcctgggtcgctttatgccggaaaagtacaaacccagctactacgcggcggcctcttatagctgccactcaatgaatggcctcttcccccatatcaaccctggcgaactgtttgttatcttggcattgccagcggtctgacaacgctgaacctgccacttggcccactggcggtgagctatctgctggttggtctggtcaccaacttcttccgcggctgggtgaccgatctgaccaccgctatttttgagaaaaagatgggcattcaacttgaacaaaaagttcatctggcaggagcaacatcatgacgcatattcggatcgaaaaaggaacggggggctggggcggcccgcttgagctggaaaccacgccgggcaaaaaaatcgtctatatcaccgsgccggtacccggcctgcgattgtcgacaaactggcacagcttactggctggcaggctattgacggatttaaagaaggtgaacccgcggaggcggaaattggtgtcgcggtaatcgactgtggcggcacattacgctgcggcatttatccgaaacggcgtattcccaccattaatatccactcgacgggcaagtccggtccactggcgcagtacattgtggaagatatttatgtctctggcgtaaaagaagaaaacatcactgtagtgggtgatgcgacaccacaaccctcttccgtgggccgtgactatgacaccagcaagaaaatcaccgaacaaagcgatggtttactggcgaaggtgggaatgggtatgggttctgccgttgccgtgttgtttcaatctggtcgtgacaccatcgacactgtattaaaaaccattcttccgtttatggcattcgtctcggcgctcattggcatcattatggcttctggccttggtgactggattgcccacggccttgctccgctggcgagccatccactgggtctggtcatgctggcgctcatctgctccttcccgctgctttcacctttcctcggcccaggcgcagttatcgcacaggttatcggcgtattgattggcgtgcagattggtctcggcaatattccgccgcatctggctttacctgcactgtttgccatcaacgcgcaggcggcctgcgacttcattccggtcggtttgtcgctggcggaagcccgtnaggacacngttcgcgtcggtgtcccttctgtactggtgagccgctttttaaccgnnnngccgactgtactgatcgcctggtttgtctccggttttatctatcaatagaggctgaaacatgaccgttatttatcagaccaccatcacccgtatcggcgcgagtgccactgacgccctcagcgaccagatgctcatcacctttcgtgaaggcgcgccagcggacctcgaagagtattgcttcattcattgccacggcgagttgaaaggtgcactccatcccggtttgcaatttacgctcgggcagcatcgctatccggtgaccgctgttggcagcgtggcggaagacaaccttcgcgaactgggtcatgtcaccctgcgcttcgatggtttaaacgaagcggaatttccgggcactgtccatgtggcaggccctgtacccgacgatatcgcgccgggatcggttttgaagtttgaatctgttaaggagtaaaaaatgaatcaggttgccgttgtcatcggtggtgggcaaaccttaggcgcgttcctgtgccacggtctggctgccgaggggtatcgcgtcgcggttgtcgatattcagagcgacaaagccgcaaatgtggcacaagaaattaacgccgaatatggtgaaggaacagcgtatggttttggtgctgacgccactagcgagcaaagcgttctggcgctctctcgtggggtagatgaaatctttgttcgtgtggatttactggtctacagcgccggaattgcaaaagcagcctttatcagcgacttccagctcggcgattttgaccgttcgctacaggtgaatctggtgggttatttcctgtgtgcgcgtgaattttcgcgtttgatgatccgcgatgggattcagggacgcattattcagatcaactcgaaatccggcaaagtgggcagcaaacacaattctggttatagcgccgcgaaatttggtggcgtagggctgactcaatcactggcgctggatctggcggagtacggcattacggtgcattcactgatgctcggtaacctgctgaaatcgccgatgttccagtcgctgttgccacaatatgccaccaagctgggtatcaaaccggatcaagtcgagcagtattacatcgacaaagtaccgctcaaacgcggctgcgattatcaggatgtgctgaatatgctgctgttctacgccagtcctaaggcgtcgtactgtaccggacagtcgatcaatgtcaccggcggtcaggtgatgttctgatcaacagcggagatccgttaaggatctccgtgagactaatagaatgcctgatgcgctacgctcatcaggcatacaggacttccgccactacattaaggaaaagttatggtatccgcactcatcactgtcgccgttatcgcctggtgtgcgcaactggccttaggcggctggcaaatttctcgttttaaccgtgccttcgacacactatgccagcaagggcgggttggcgtgggccgttccagcgggcgctttaaaccgcgggtcgtggtcgccatcgccctggacgatcagcagcgcatcgccgacaccttgtttatgaaaggactgaccgtcttcgcccgaccgcaaaaaattcccgcaattaccggtatgcatgcgggtgatttacagcccgatgtgatctttccccatgatccactatcacagaatgctctatcattggcgcttaaactgaaacgtggataatttcgttgtgaatgttacttgcttgcgaagttatcattttgaaacctaaatcaggtaatcacgcccatgaaacctcgtcagcgtcaagccgccattctggagtatctgcaaaagcagggaaaatgctcggttgaagaattggcgcaatattttgacaccacaggcacaactattcgcaaannnnctggtcattctggaacatgccggaaccgtcattcgtacttatggcggagtggtgttgaataaagaggaatccgatccgcctatcgatcataaaacactcatcaacacccacaagaaagagctgatagcagaagctgccgttggttttattcatgatggcgattcgatcattcttgatgctggcagtaccgttttgcagatggtgcctctgctctcgcgctttaataacatcacggtgatgaccaacagcctgcatatcgtcaatgcgttatctgaactggataatgaacaaactatcctgatgccaggcggaacgtttcgtaaaaaatcggcctcatttcacgggcagctggcagagaatgccttcgagcatttcaccttcgacaaattattcatgggtaccgacggcatcgatctcaatgcgggcgtaaccaccttcaacgaggtctataccgtcagtaaggcaatgtgcaatgccgcgcgcgaagtgattttgatggcggactcatcaaagtttggccgnaaaagccccaacgtagtttgcagtcttgaaagcgtcgataagctgattaccgacgcagatatcgatccggcgtttcgtcaggcgctggaagagaaagggatcgatgtgatcataaccggagagagcaatgagtgaagcantactgaacgcgggacgtcagacgttaatgctggaattgcaggaagcaagccgtttaccggaacgtctgggcgatgattttgttcgcgccgccaatatcatcctgcactgcgaaggcaaagtggtggtttcgggaattggcaaatcgggccacattggtaagaaaatcgccgcaacgcttgccagtaccggcacaccggctttttttgtccatccggcagaagcgctgcatggcgatctggggatgatcgaaagccgcgatgtgatgctgtttatctcttactccggtggggcgaaggaactggatctgattattccgcgtctggaagacaaatctatcgcgctgctggcgatgaccggcaaaccgacgtcaccgctgggcctggcggcgaaagcggtgctggatatctccgtagaacgcgaagcctgcccgatgcaccttgcgccgacctccagcaccgtcaataccctgatgatgggtgacgcgctggcgatggcggtcatgcaggcgcgcggatttaatgaagaagattttgcccgctcccaccctgctggagcactgggcgctcgcttgctgaataaagtgcatcatctgatgcgccgtgacgatgccatcccacaggtggcgttaaccgccagcgtgatggatgctatgntggaactcagccgcaccggtctggggctggtggcggtatgtgacgctcaacaacaggtacaaggcgtctttaccgacggcgatttacgtcgctggctggttggcggcggcgcactcaccacgccagtcaatgaagcgatgacggtcggcggcaccacgttgcaatcgcaaagtcgcgccatcgacgccaaagagatcctgatgaagcgcaaaatcactgccgcaccggtggtggatgaaaacggcaaactcaccggcgcaataaacctgcaggatttctatcaggccgggattatttaatccttcaatcccagacgtttcgccagccgatgcaggttggcgacgtcggtttccagcatccgcgcgcaggcagcccagttgtgatgattttgtgccagtgcctgacgaatagtttcacgctggaacgcttctgtcgcttcacgcaggttttgcttaacaacgggcaccgccgccacttctggcggcggcaacgtcacctcaggaaaagcaaaatgttgcgcctcaagaatcacttcatcgccgctgcgggtggctctcgccagcactaccgcccgatgaatagcatgttccagttcgcgcacgtttcccggaaaactgtagtgttgcagtaaatttcgcgccccggcacttaataccacgcgggagagcccctgccgcaaacgacactgctcgcagaaataccccgccagcagaatgacatcatcgccccgctcacgcagcggcggcaccgaaagtggaaacacactcaggcgatgaaacaaatcggcgcggaatcgccctgccagcacctcttcgcgtaagtcgcggttagtcgccgccagcacgcgcacatcgacccgcaaactacggtcatcgccaacgcgctgaatatcgccatactgcaacaccctcagcagcttggcctgcaatgccaacgacaactcgccgatctcatcgagaaacagcgtgccgttatccgccatttcaaacttcccactgcggttactgatagcgccagtaaacgctcctttcacatgcccgaacaactcactttccgccacactttccggcagtgcggcacagttgagatagaccagcggattcaccgcccgtggcgaggcctcatgaatcgctttcgccaccagctccttaccggttcccgtctcaccgctgatcaggacgttgagatcggacgccgccacaatctcaatctcttttttcagttgcgtcatgcctggcgacagaccgatcatctgcgtctgtttcaccgcttcaaatggagcggcatcgcccggcagcatattctggctttccagttgttcaatcagcaacgcattgcttaacgctcccgccgccagcgcggcaatcaggcgtaactcttcgtcgctgaaaacatcgaactgatcgggctgcatcccgtcgagcgtcaatgcgccgatcaggttttgcccggcaaacagcggcagaccaacgcaggcgtgaaccttcagactctcctgccctggaatcaaaccgtcatagggatcgggcaattcgctgtctgcgggaaagcgcaccacatcacccgcgcgggcaatcgcttccagccgtggatgaccttccagcgcaaagcgtctaccgagtacatccttcgccagcccgtcgatggcaagcggaataaactgccgcgagtcgtaacgtagcaacgcagacgcatcgcactccagcacctgacgcagcgtggtgatcaggcgctgaaaacgatcctgatgaccaatcccacgctgcaattcgatggcgatattcgccagcacatcaacggaaaaactcatctttgcctcactgtcaatttgactatagatattgtcatatcgaccattggattgatagtcattttgactactcattaatgagcataattttatttatagagtaaaaacaatcagataaaaaactggcacgcaatctgcaattagcaagacatctttttagaacacgctgaataaattgaggttgctatgtctattgtggtgaaaaataacattcattgggttggtcaacgtgactgggaagtacgagattttcacggcacggaatataaaacgctgcgcggcagcagctacaacagctacctcatccgcgaagaaaaaaacgtgctgatcgacaccgtcgaccataaattcagccgcgaatttgtgcagaacctgcgtaatgaaatcgatctggcggatatcgattacatcgtgattaaccatgcagaagaggaccacgccggggcgctgaccgaactgatggcacaaattcccgatacgccgatctactgtacagccaacgctatcgactcgataaatggtcatcaccatcatccggagtggaattttaatgtggtgaaaactggcgacacgctggatatcggcaacggcaaacagctcatttttgtcgaaacaccaatgctgcactggccggacagcatgatgacttacctgacaggcgacgcggtgctgttcagtaacgatgctttcggtcagcactactgcgacgagcatctgttcaacgatgaagtggatcagacggagctttttgagcagtgccagcgttactacgccaatatccttacgccgttcagccgtctggtaacgccgaaaattaccgagatcctgggctttaacttaccagtcgatatgatagcgacctctcacggcgtggtatggcgcgataacccgacgcaaattgtcgagctgtacctgaaatgggcggctgattatcaggaagacagaatcaccattttctacgacaccatgtcgaataacacccgcatgatggctgacgctatcgcccaggggattgcggaaaccgacccacgcgtggcggtggatcgtctttccacgcgcctgcaggatgcgggtttcgaaatgtcgcttagcctgaaagcgaaatggcgaccagaccaggacgctctggagttatgccgtgaacacggtcgcgaaatcgcccgtcagtgggcgctcgcgccgctgccgcagagcacggtgaatacggtagttaaagaagaaacctctgccaccacgacggctgacctcggcccacggatgcagtgcagcgtctgccagtggatttacgatccggcaaaaggcgagccaatgcaggacgttgcgccaggaacgccgtggagtgaagtcccggataacttcctgtgcccggaatgctccctcggcaaagacgtctttgacgaactggcatcggaggcaaaatgagcaacggcattgtgatcattggttcgggcttcgccgcccgccaactggtgaaaaatattcgcaaacaggacgccagtattccattaaccctgattgccgccgacagcatggatgagtacaacaaacctgacctcagccatgttatcagtcaggggcaacgtgccgacgaccttacccgccagacggcgggtgaatttgccgagcagtttaatctgctcctgtttccgcaaacctgggtgacggatatcgatgccgaagcccgtgtggtgaaaagccagaataatcagtggcaatacgacaagctggtgctggcaaccggtgccagcgcctttgtcccgccagtgcctgggcgtgagttaatgctgacgttaaatagtcagcaagagtatcgcgcctgtgaaacgcaactgcgggatgcccgacgcgtgttgattgttggcggtggtttgattggtagcgaactggcgatggatttttgtcgtgcaggcaaaatggttacgctaatcgacaacgctgccagtattctggcgtcgttaatgccaccggaagtaagcagtcgcttgcagcatcggttgacggagatgggcgttcatctgctgttgaaatctcagttgcaggggctggaaaaaacggattctggcattctggcaacgctggaccaccagcgcagcatcgaagtggatgcggtaattgccgccaccggactgcgcccggaaaccgccctggcacgacgcgccggnntgacgattaatcgcggcgtttgcgtcgatagttatctgcaaaccagtaatgccgatatttacgcgctgggcgattgcgcggaaattaacggtcaggtattgccgttcctgcagccgattcaacttagcgcgatggtgctggcaaaaaatcttctcggcaataacacgccgctgaaactaccggcgatgctggtgaaaatcaaaacgccggaattaccgctgcatctggcaggcgaaacccagcgtcaggatttacgctggcagattaataccgaacgccagggaatggtggcgcgcggtgttgacgatgcagaccaacttcgcgcctttgtggtcagtgaggatcggatgaaagaggcatttggattgttgaaaacgttgccggtgtaggtgggctactgtgcctaaaatgtcggatgcgacgctggcgcgtcttatccgacctacggggacgcatgtgtaggccggataaggcgtttacgccgcatccggcaatggtgtccaaatgcaacacgttttatccgttctggacttcacccgctaaccaacgcgccgcagcaataaccccctgccccagagacaaaccgccatcacccgccggtaaactctgtggaaacagcaatgtgaaatcagcgagataatgcgccagacgtgcacgcagcaaacggttatgaataaccccgccgctaaataccagcgtagtgataccacgcatcgtggcctgctcacgcatcaacgcggcaaaaccctgcgccagcgcatcatgaaacgcccacgcgcgttgattaaccggtgcctgccagttcagccactgctgccagaaagtggcgagatccagttgattgtccacccgcggcatcgtcaccggatgcgtcactccgtcgcatgaggctgctagcgcctccagagcacaagccgcttcaccttcataacttaacgtggctggcgcacagcccagtgccgccgccacagcatcgaacaaacgcccacacgatgacgccagcggcgcgttaattccacgctcaatggcccgcgccagtacnctccagttttgctgttgcacacttgccgtttcagggtaattctgccactccggcacaaagcgcaggcactgcnccagcaggttacgccacggctgcttcgccgccaaatcgccacccggaagcgccactgcaggcaagccgcccaggtgctcacattcgcgatagttcacccgcaggcactcgccgccccacaaagcgccgttctcccccataccgataccgtcgagcgtcaaagcaatgacatcaccgccatccagcggccactgatgctctgccagacacgccgctgcgtgggcatgatgatgcagcaccgtttgcgtcggcagattcatttcgctcgcccactggcaggagacatagcccggatgtgcgtcatgcacaacgtattgcggagtgaaattgtagatgttttgcatcaggcgtaacgcttcgcgccactgcgtctggatgccatcgtcacttaaatcgcccagatgctggctcaacaccacttgttcaccgcgcaccaggcagaaggtatttttcagatccgcgccgagacacagtacaggcggaacatttttaaagcccggaggcaaagccagcgcatccggcacatacccccgcgaacggcgcagcatttcgccgctttcgcgcaccaccgaatcatccatccgctgcacaatgtcgcggttgtgtattaagaatccgtcggcaatgccctgcaaatcctccagcgcctgttcgttgctgatagccggtggtttaccgctcaggttgccagaggtcatcaccagcgggcattgtagttcctgtaacagcaaatgctgaagcggattcgcaggcaacattaccccgacttcgttaaggccaggggcgatatcatcacaaagctcaggaacgtattttttatccaccagcacaatcggcgcggcgggcgtggtaagcaactggcgcgcagcgtctggtaaaccgtcagccactggcaacatgactgccagcggtttcgccgggcgatgtttgcgcgcccgaagtgtcgccaccgcgttactgttacgtgcatcgcaggcaagatgaaatccgccaatccctttgatggcgacaatgttgcccatttttaactgtgcgatagccgcctgtaatgccgcntcttgttctgcatgttcaccatgacttacccattcaagatacgggccacactccgggcaggccaccggctgggcgtggaagcgacgatcgagcgggtcgcggtactctttatcacaggctggacacagcggaaacgccgccatcacggtaaacgggcgatcgtaaggcatggcgcgaataatggtgaagcgcgggccgcagtgggtacagttgataaatggataacgataacgccgttcgcctggggtattcatttcggcaaggcaagcagggcaagtggcggcatcgggaacaatttgcgtattcatggcgccgcccgcgctctggcggatggtgaactcagtgggcagttgtgaccagataaacggttcacgctcaacgctatcaatacgcgccagcggcgggcagtgctgatgcaattgaacaagaaacgtttccgggtcttccagcagccggacttctacgccatcgccgtcattacagacatcgccgtgaagatttaattgctgtgccagctgccagacaaacggacgaaaaccgacgccctgcactttgcctcgaatacgcagttggacaccgcaagatgtgttttttgccattgagttattcccgccatcatgaattgcgtaacccgtccagccggacacgacagcgtcgcatccggcagtcacaggtcggcgataccgcccgctccgtattctacgaatatttccgggaattcctttgatgccagaacagttctgtaagatttttagaacatcagcgccgtacggcggcgtttttctgcgctcagttgttcaagtttattgcgatcgacacaaattagcgcatgggtcgggcaagccgccatacacgccgggccgtnttcacgatggttgcacaggtcgcatttattggcttcggctttgtcagcccgtacattcagccctgcgccgctgttgcgaatcaccggacgtaccaccacttccatcgcgccatacgggcaagccacaacgcaggttttgcaaccaatgcaacgttcctgcatcacatgaacaaaccctttaccacggctgatagcaccattcgggcagacgttagcgcacggtgcatcttcacactgacggcaaactgtcgccgtggaaatgttcacacctttaatgacatggatacgcggtaaaaatgtttccggggtcagcgatgcacagtcctgattttcctgatgagaaaccacgcacgccacttcacaggtacggcaaccaatacatttactcgcgtcagcaatgatgaaacggttcatcaaattctccagcaatgacagttaatgcgccgatacattcacaaatcatgccagtttttaatttgctgttatttaaggnnnnnaatttctgtaatgcaggaaaaaagatgtcatcgacactagtgacgatgacatgtgatgacaatgtttatcgcgaaagagcaatgagtgagtcgcggcggatcagttttccgctgaaggttttcggcggtgagaaatccccgccatcgagcataaaaatcagccgtccaataatttcctgaatcatctcagtcaccggaatttttacgctggagagcgccggaacgatatagggggcaattgcgatatcatcgaatccgataactgacacctgctctggcaccgctacgccgcgcttgtgtaacgctttcatcgcacctatcgccatatcgtcgttactggcaactaacgcgctannnnnanncccacgttcgagcaacgtttctaccccttcggccccgctggcgggcgtccatttaccgttagcgataagtttttcattgagcgcaataccatgctgcgccagcgcgtctttatatccggcaagacgttcaacgctggtgggggaatccatcgagccggtaagaaaagcaatctcctgatgcccggcgtttatcaactctgccacggcgttaaagctggtctgtttatgatcgcaccagacgctatggctgctatttttgcgcaggcggcgattaagcaccattatcggctgactgtgcgcgtcaatgatgtcatcgatctcatccacacttaaaaannnngggtaaatcataatggcgtcgcagcgcaaatccagcagatactgaatcgcctggcgctcttcttcggcgctgtgtttaccatctgccaatagcaactgccgccctttatcttccgccattcgcgcggcatgaaacagtaattcactaaaataaatgccgtggtaaagcgtgttagtcactaccagccccagcgtctgggtacttttcgccgacagattgcgcgccagcaagtttggacggtaaccgctctcttctaccgcctgaaacacgcgatctttagtctcctggctgacgtagccattacctgaaagcacgcgggaaacggtcgcttttgaaaccccggcgcgcttcgccacttccagcatcgtcgtcatcattttcatccctttacacgcaatcaacgcagtgtactgcaccgtttaccgattgtccttgcgcactcggcgggaaaaacattcaggtgaccggtttcacaaatataaaaaatgaacaattaaatctcttgcttatttggttacaactattcatgattttgtgaaaccggtttcttaattccgtttcagcatcggcatttttccgtcacgtcgactgataacaactacatcttccctactgataacaggataaaatccgatggccnaaaattatgcggcgctggcacgctcggtgatagcggcactgggcggcgttgataacatctcggcggtcacgcactgtatgacgcgtttgcgctttgttatcaaagatgatgcgcttatcgacagcccgacgttaaaaaccatccccggcgtgctcggcgtggtacgtagtgacaaccagtgtcaggtgattattggcaataccgtttcacaagcctttcaggaagtcgtcagcctgctgccgggagatatgcagcccgccctgcccgtgggtaaacccaaactcacgctgcgtcgcattggtgcggggatcctcgatgcgctgatcggcaccatgtcaccgctgatcccggcgattatcggcggatcgatggtcaaactgctggcgatgatcctcgagatgagcggcgtgctgacaaaaggatcgccgaccttaaccattctgaatgtgattggtgacggtgctttcttcttcctgccgctgatggtcgcggcttcggccgccatcaaatttaaaaccaatatgtcgctggcgattgccatcgcgggtgtgctggtacatccgagttttattgaactgatggcgaaagcggcccagggtgaacatgtcgaatttgccctgattccagtcaccgcggtgaaatacacctacacagtgatcccggcgctggtgatgacctggtgcctgtcatatatcgaacgctgggtggatcgcattacaccggcggtgaccaaaaacttcctcaagccaatgctgattgtgttgattgccgcaccgctggcaatcctgctgattggcccgattggtatctggatcggtagcgccatttcggcgctggtttacaccattcatggttatctgggctggctttcagtcgccattatgggcgcgctgtggcctctgctggtaatgaccggaatgcaccgcgtctttacgctaaccatcattcagaccattgccgaaaccggcaaagaagggatggtcatgccgtcagagatcggcgctaacctgtcgctgggcggttcatcactggcggtggcgtggaaaacgaaaaacccggaactgcgccagactgcgctggctgcggcggcatcagccattatggcggggatttccgaaccggcgttatacggcgtggcgatccgcctgaaacgtccgcttatcgccagtcttatcagcggttttatttgcggcgcggttgccggtatggcggggcttgccagccactcaatggcagcgccggggctatttaccagcgtgcagttcttcgatccggcgaatccaatgagcatcgtctgggtgttcgcggtcatggcgctggcggtggtgctgtcgtttatcctcacactgttgctcggctttgaggatattcctgttgaggaagcggctgccgaggcgcgaaagcatcagagcgcacaaccgaccgtcgccaaagaagtaagtcttaattgaggatgaaaatgtcagtatttccagaaggttttttatggggcggcgcgcttgccgccaaccagtctgaaggtgcgttccgtgaaggtggcaaaggactgacaacggtcgatatgatcccacacggcgagcatcgaatggcggtgaaactggggctggaaaaacgttttcagttgcgcgatgacgagttttatcccagccatgaggcgacgggtttttatcatcgttataaagaagatatcgccctgatggcagagatgggattcaaagtgttccgtacctcaattgcctggagccgcctcttcccgcagggtgatgaactgacgcccaaccagcagggcattgctttttaccgttctgtctttgaagagtgtaaaaagtacggtatcgaaccgctggtcacgttgtgccacttcgatgtgccgatgcagctggtcaccgaatatggctcctggcgtaaccgcaagctggtggagtttttcagccgctacgccaggacctgctttgaagcatttgatggtctggtgaaatactggctaaccttcaatgaaatcaacattatgttgcatagcccgttctccggcgcggggctggtgtttgaagaaggtgaaaatcaggatcaggtgaaatatcaggccgcgcatcaccagctggttgccagtgcgctagccaccaaaatcgcccatgaggttaacccgcaaaatcaggtgggctgtatgctggcgggcggtaacttctacccttacagttgcaagccggaagatgtctgggcggcgctggagaaagatcgggaaaacctgttttttatcgatgtgcaggcgcggggcgcgtatccggcttactctgctcgcgtattccgcgaaaaaggggtaaccatcgacaaagcaccaggcgatgatgagatcctgaaaaacaccgtcgattttgtctctttcagctattacgcctcgcgctgcgcctcggcggagatgaacaccaacaatagcagtgcggcgaacgtagtgaaatcgctgcgtaacccgtatctacaggtgagcgactggggctggggaattgatccactcggtctgcgtatcaccatgaacatgatgtacgaccgctatcagaagccgctgtttctggtggaaaacggcctcggcgcaaaagataaacttgctgccaatggcgagattaacgatgactatcgcatcagctatttacgcgaacatatccgcgcaatgggcgaagcgattgcagatggcattccgctgatgggctacaccacatggggctgtattgatttagtttccgcctctacgggtgaaatgagcaaacgctacggttttgtctttgttgaccgtgacgacgcaggcaacggcacgctgacgcgcacacgtaagaaatcgttctggtggtataaaaaagtgattgccagtaatggggaagatttagagtaggtaacctactgtcgcactaaccaggaaggcccgataagcgttgcgcatcgggcaatctggggtttgctatcagttctgattccctcatcaagaacatccctgtcctgattacttattgaaaaactactcttcttccaccgctaactgcgcgaagccgccgttcccttcccagccttccagtcgttgataaacggtttctaccgcatctttaatcggctgggtcatcgggtagtaaaagccgacgatatccggctggatgccgaggaaaatcacttcgccaatatcttctttcaactgatcgataaggtagttcaacggcatgttatgggtagtcatcataaacatctcggcgatatcatccgggtcgatgatgcggatttcgccggggtttagccccatatccgtggcgtcgacaatcagcagccgtgtcgggcgcagttcgcggatagcgacaatgtcgttttccggtgcgctaccgccgtcaatcaccacccagttacctttcggcgcggcggcgcacttttccgccagcagcggacctgcgccatcatcacccatcatgctattgccaacacagagtaaaacgtcagtcacgcagtctcctcaccatcaaatagatggcgttttcctgatgaatatcatgcagcatacttaacagcattgtactccattcctgctgctgcgaagtttgcgctgcccgggctntatcgaatgcattggccagcatcggcacatggttaatgtcgatgacgatctcaccatatttcggcacaccttccattttgcggcgggcttcgctgcccgcctccagagtggcaatccatgccagatattcatcccacgggcaggtgagcgccgnttccaggcaatcgataaccccaaggtggtgaccaatcgccaggctgtaatagaccacctgctgcgcctcggcgggcgtggcatcgttctcatcaataaatttacggctcagttgactgaacaccaccttttcactcatcggatacgcgcctcttcaacaacatgattcagatggctgacaatctcgttcagacgcggatcgttttccgcttccagccagcgtgcaacctgttcttcgccctgccctaactgtgtaaggtaatcatcggcaatctgacgaccgtaacgataacccgccagtcgacgtgcttcgcgatccactttcacacgcagcggctgcaccatatcgccatgcaggatctccgccggttgttcatcctgctcacccggcccacgggcgtgaattttctgctccagcaggccgagcgccattgcaaagccgtacagcgtggcggctggcgttggcgggcagccagggatataaacatccaccgggacgattttatccgtaccgccccacacgcagtagagatcgtggaagatcccgccgctgttaccgcaggcaccgtaggagatacaaattttcgggtccggcgcggactgccacgcacgcagcgcaggggatcgcattgcacgggtgaccgcgccggtaaacagtaaaatatccgcatgacgcggtgaaggaacgactttaatgccgaagcgttctgcatcgaacagcggcgacaaagtggcgaaaatttcgatttcgcagccgttgcagccgccgcagtccacgcggtaaacgtaggcagaacgtttgatttttttcagtaacgacgccttcatgctggcgatggattcatccaccgtcatcgggaccggaatgccgttggcgtcacgggggcctaataaattgctcatcagatggcctctttcatatggcgagtcagttcaatacggtcggacggcaccaggcatttctggcgcttacattccgggcaagtctcaaagctttcgcggtggttttccgcgcggctgtcgccattgtgcttaagcagcgcaatggcgtagtcgatctctttctggacggcgaaaggacgattgcagacgcggcagttgcacagcgcgaagcgggactgttgcaggaagtcttctttcttccacaccgccagttcgtactcttgcgacagtttgattgccgccgtcgggcagacttcttcgcagcgtccgcagaagatgcagcgcccgagattgaactcccacgccagctcaccggtggcgaggtcagtttcaaccgttaaggcgtttgacgggcaggcattgacgcaggccgcgcanccgatgcactgctgcgggttctgctctggcttaccacggaagtttttatcaaccgcaatcggttccagcggataagacgaggtcgccgtgccggttttgatgacttttttgataaaggtaaacatggcgattccttatttcagcggcgagtttttacgctcaatgctgtaacgctcgagttctttgtacggcaccactttgctctttttcttacgcacatcgaccacggtcatgcggtcggtacaggagtagcaagggtccagactaccgataatcagcggcgcatcagaaacggtgttgccgcgcagcatgtagcgcagggtcggccagttcgcgtaggtcgcggcacggcagcgccagcggtacagcttctggttgtcgccggtcatgctccagtggatatcatcgccgcnnnncgcttcggcaaagcccagcgcaaaacggtgcggaatgtaggtaaagccttccaccatcagcgggccgcccggcaggttatccagaccgtagtcgatcatgttcagcgcggtatagacttcgttaatacgcactttcagacgcgaaataacgtcgcagccctgctcgctgtggacttccattggcagcaggccataaccaacaaacgggtgatcggcgcgggtatcgcgggcgtgaccgctggcacggaccatcgggccgacgttactgaagtcgcgagcgatttccgggtccagacgaccaatgccgacagtgcgctgttccatgttcggcgtactcagcagcacatccaccagctcctgcacttcacgacgcatctgttgcgccagttgacgggtctggatcatgtcatctttcagcagatcgcgacgaatcccgccgatcaggttcaggccgtaggttttacgcgcaccggtaaggatctctgccattttcatggaggtttcacgcacgcggaagaactgcataaagccggagtcaaagccggtaaagtgacaggcgaggccgaggttgagcagatgcgagtgcagacgttctacctccagcagaatggcgcggatcatctgcgcacgttctggcacctgaatacccatcgcgttttccaccgacgtggtgtaggcggtgctgtgagcaaaaccgcagatcccgcacacacggtcagagaggaaggtcacttcgttataacccatgcgggtttctgccagtttttccatgccgcgatggacatagaacaggcggtagtcggcgtcgataatgttttcgccatcgacgaacagacggaagtggcccggttcgtcagaagtgacgtgcagcggaccaatcggcacgacgttgtttttcttgtcgcccagttcgttgatgaactcgtaggtttcagcatcggtggtcggtgccggacgctgacgataatccatgctgtctttacgcagcggataaagttcatccggccagtcatccggcagcaccagacgacgttcatccggcaaaccaaccggaatcaaaccgtacatatcacgtacttcacgctcgccccacaccgcagccggaacgcgcggcgtcacggaaggatactccggtttgttggcatcaacttcgacgcgaaccgttacccagcacttagtccccttctccatcgacagcacgtagtaaacggcgtaatgaccattcagtttgcgttcgtcgttaccaaaaagcaccgacagccagcccccctgnttgtagtagagaaactccaccacttccggcagatagttcacctttacggtgacagtcagctgatctttggtctgccaggcgtggtccagcacgacgcccggaaatgcctcattcagcgcggcgagataatgttnacctaatttttcttcagacatgctcaaactctctttaatcacgccgccagcaaggagacgaacgctaaaaatgcaaagccaaacccagcccaggtaatgcgcggagtaatatcaagacgcagacgggccatgctgttttcgaacagcgcgataaccaggacgccgaccaccagtttgacgatggcaatcaccaacgccagcagcagcccaccgncggtgaaggtttccatttgtccccacggaataaacaccccgacgaacatctgcagcaccaccaactgtttcaggctgataccccatttcatgacgccaaagccgctgccgctgtactcagagagcggaccttcctgcaactcctgctcggcttccgccaggtcgaacggcagtttgcccatttcgataaaagtggcgaacgcacaggcacaaagcgccagcaccagcgggatgctctggctcagcggccagtgataaacggtgtcggtgatgttgctgatgttggtggaactggcaacctgtgcggcaacccacagaccaagcagcagcatcggttcgaccagcacgccaagcatcgcttcacggctcgcgccgatagcggtaaacggactaccggtatccagaccagaaatggcaaagaagaaacgcgcgatggcaaagagatacagtaaggtgatcaaatcacccagttgcggcagcggagaaccgacggtcaccaccggcagcgcagtagcgatagtcagcatgacgcccaccatcacatacggcgtcaggcggaacacccagccggaggcatccgggccaacgctctggcgacccagcaatttgataatgtcgcgatactcctgcaacacgcccggcccgcgacggttatgcaagcgggcgcgcgccacgcgggtaataccggagagcagcggcgcaacggcaaatagcaccagcgcctgaattaacggatataaaacactcattctcaggctcctcgtgaaacaataatcaccaccagcaccgccagttcaaccagcgccatccggcggaacagcaacgcactgccntcgcactgccagcccggcaccagcgacaccggattcagccatttgcgcagtttcagcaccggcgcaaacgcctgtttcaccggcatggcaaaaccgtgggcggtaattaccattgatttttcatggtcgtagccgcacacccaggccgcgccgcgggaacgcgatggcaaacgatcgcctttgcaaatcgccataatgatgaatggcagcagcgggcaggcaatcagcagcaacgtgatcatcggttgagaaacggtggtgttagcaggttccagcggcagaggtacagcagcagagagcatcggcagcagccacggcgcagcaacaccgccaattacgcagcaaatcgccagtgccactacgcttacgctcatcaggagcggtgcacaggtggcgttttcggcttctttggtacgcggcgcgctgaggaacgtgacgccatagactttcgccatacacatcaccgccagcgcaccggtaattgccagacccacagcgagcagcggccccagcagacgggcaacaaacgcgccactattgctcagtttgaagaaggattgatagataacccattccccggcaaaaccgttcagcggcggcagtgcagccattgccatcagcccgactaacatagcgatggagataaccggcattttcttgccaataccaccgagtttttcgatatcgcgatgaccggtacggaaccagacgntccccgccccgaggaacagtacgcttttgaacaggctatggttaagcagatggtacagaccaccgaccaggccaagagcaatcagcgccggttgttcgagcgcgatacccgttacgccagcgcccagccccagcaggataatgccgatattttccagggtgtggtaagccagtagacgctggatattatgttccatcaacgcatacagaccgccgacaaacgcggtgatcataccgagcaccagcagcgcgatcccccaccacagcggtgcattaccgcccagcagtgacagggttaaaatgcccagcaggccaattttcatgactaccgtagaaaacaacgcggcagctggcgcagaggcgttcgcatgtgcctgcggcacccagccgtgcagcggaataatcccggccagcaggccaaagccaatcacactgagcagccagatatcggaaccgagcggcagctgttgcatacgcatatccagcaggcgcagatccagcgtgccgtaacgntgccacagcagccagcaagcaatcgccagcagcagagtgccaagacgccccagcgcaaaccacagtttgccctctttgctgttgctggtgaggaacaccgcacacaaggccatgacttcggccattaccacgaacatgccgaggttgctggcaatgacggcgcagacggcggcagccatcaacatattgatctgcaagccgttgcacttcacctgcgcgtggcgatgccagtcaatgttgtagaggctgacaaacagaccgcacagaccgagcgtaatcagccaaatcgcgttaagcggagagatttgcacatcgtagcttaccagcgacagcgcaccgctcacgccaaccgcgccagtcagtacagtgaagcccgcggctgccgtatacagactaccaaccgcgccgccaattccggctatccagccgcttagcgccttttgaaaagaaaagagaaatgccagaacagcggcggcgacaaaccacgccacgccgctattgatcagggaaattgcgctcatttagcctctccactttgagcctgctgaaacaaggtgagatcgccaaagtccgtgttaaaggtcagctcacgcttacgtttgctgacgcgggcgatatcggtgttatccaccagatgcagggctttagtcgggcacatccgcacgcaggccggaccttgttcatcaaagctacaaaggtcacatttgacggcgatcgcgcgaatacccggcacccagtcaagcagcgtactgatacgcgccggagcaggcggtgccggtggcgctttcggggtattggcatttgcaggaatatccagcggacggctgccggaaaattcaattgcgccaaacgggcaggcgatgccgcacagcttgcagcttacgcacaggctttcattcaactgcacggccccatcaacgcgggtgatggcgttaaccgggcagaccaccgcgcagggtgcatcttcacagtggtgacagagctgcggcgcagattctttttcatttagcatcactctcaggcgcggcattgattgcaggccgtgctggcgatgcgtctctgaacaggcggcctcacaagtgtggcaaccgatacagagcgtggagtcagcaattacaaaacgattcaccgggcattcctcaggtgattgtcatttttgacgaaaacatgccgatgaaatgtcattttcgacactcatcgacacgcccatccccaaacaggcgtaacgcctgcaaaacgggcaaagcctcagctcatgctgccgggctttgtccctttaccagttggcttaaattcaccggcacattgttttcaatagcggtgtataagctgtcgtaaacgccagcgattttttcgagatagtgttccagaacctgttcgcgatcgcggatgttgaccttgccatcaatcatgccgtcaatgctcagttgcgcctgcgcaatccgctgtttgtcttcgccatcttttgtttcgacgtaatactcgatggtgtggctgttaaagccatccgccagggtgacgtaaatacgaaaatgttcaaaaaggacgaaacagagttctttgtccggcgcgcagctcatggcgtgatgcaggcgcgctttcgataacgtgatcccctgaaccagcgaattgcagtagatgtgccactggtcctgtaggcgacgatgccgctgtgcgatgtaatcggctttctcgcttatttcccaaatagtcattgtcaggttacccgtttaacagagatgccagctttaagcattttttgtgccaacttttnnnntattattattaaagcgatttttaagattttggtgaatttcgtcgccgtgtcgacgtgtcatttcgacatcatcgacattattcactgcagggataatcaacactggcacaattattgcttgtagctggcaatagttaatgggaggcgatatgcacgaaataaccctctgccaacgggcactggaattgatcgaacagcaggccgcaaaacacggcgcaaaacgcgtaactggggtctggctcaaaattggcgcattttcttgtgtcgaaaccagctctcttgccttttgttttgatctggtttgccnnnncagcgtggcggaaggttgtaaactgcacctcgaagaacaagaggccgaatgctggtgtgaaacatgccaacagtatgtgacgctactgacccagcgcgtccgccgctgtccacagtgtcatggtgacatgctacagattgtggcagacgacggtttacagattcggcggatagaaatagaccaggagtgagcgatgtgtacaacatgcggttgcggtgaaggcaacctgtatatcgagggtgatgaacataaccctcattccgcgtttcgtagcgcgccatttgccccggcggcacgcccgaagatgaaaatcaccggcattaaagcgcctgaatttacccccagccagactgaagaaggcgacctgcattacggtcatggcgaagcgggcactcacgcaccgggcatgagccagcgtcggatgctggaagtcgaaattgacgtgctggacaaaaataaccgtctggctgaacgcaaccgcgcnnnnnnnnnngcccgcaagcaactggtgctcaacctggtttccagcccaggttccggtaaaaccaccctgctgacggaaaccttaatgcgcctgaaagacagcgttccgtgcgcggttattgaaggtgaccagcaaaccgtgaacgatgccgcacgcattcgcgctaccggcacaccagcgattcaggtgaacaccggtaaaggctgccatcttgacgcacagatgattgccgacgccgcaccgcgtctgccactggacgataacggtattctgtttatcgaaaacgttggcaacntcgtatgcccggccagcttcgatctcggtgaaaaacacaaagtggcggtgctttccgttaccgaaggtgaagacaaaccgctgaaatatccgcatatgtttgccgccgcctcgctgatgctgctcaacaaagttgacctgttgccgtatctcaactttgacgttgagaagtgcatcgcctgcgcccgcgaagtcaatccagaaattgaaatcatccttatttccgccaccagcggcgaagggatggaccagtggctgaactggctggagacacagcgatgtgcataggcgttcccggccagatccgcaccattgacggtaaccaggcgaaagtcgacgtctgcggcattcagcgcgatgtcgatttaacgttagtcggcagctgcgatgaaaacggtcagccgcgcgtgggccagtgggtactggtacacgttggctttgccatgagcgtaattaatgaagccgaagcacgcgacactctcgacgccttgcaaaacatgtttgacgttgagccggatgtcggcgcgctgttgtatggcgaggaaaaataatgcgttttgttgatgaatatcgcgcgccggaacaggtgatgcagttaattgagcatctgcgcgaacgtgcttcacatctctcttacaccgccgaacgccctctgcggattatggaagtgtgcggtggtcatacccacgccatttttaaattcggcctcgaccagttactgcctgaaaacgttgagtttatccncggtccgggttgcccggtgtgcgtactgccgatgggcagaatcgacacctgcgtggagattgccagccatccggaagtcatcttctgtacctttggcgacgccatgcgcgtgccggggaaacagggatcgctgttgcaggcaaaagcacgcggtgccgatgtgcgcatcgtctattcgccgatggatgcgttgaaactggcgcaggagaatccaacccgcaaagtggtgttcttcggcttaggttttgaaaccaccatgccgaccaccgccatcactctgcaacaggcgaaagcgcgtgatgtgcagaatttttacttcttctgccagcatattacgcttatcccgacgctgcgcagtttgctggaacagccggataacggtatcgacgcgttcctcgcgccgggccacgttagtatggttatcggcactgatgcctataattttatcgccagcgattttcagcgtccgctggtggtggctggtttcgaaccccttgatctactgcaaggcgtggtcatgctggtggagcagaaaatagcggcccacagcaaggtagagaatcagtatcgtcgggtggtaccggatgccggtaacctgctggcgcaacaggcgattgccgatgtgttctgtgtcaacggcgacagcgaatggcgcggcttaggcgtgattgaatcttctggcgtgcacctgacgccggattatcaacgattcgatgccgaagcacatttccgcccggcaccgcagcaggtctgcgatgacccgcgcgcgcgttgtggcgaagtcttgacgggcaaatgtaagccgcatcaatgcccgctgtttggtaacacctgtaatcctcaaaccgcgtttggtgcgctgatggtttcctccgaaggagcgtgcgccgcgtggtatcagtatcgtcagcaggagagtgaagcgtgaataatatccaactcgcccacggtagcggcggccaggcgatgcagcaattaatcaacagcctgtttatggaagcctttgccaacccgtggctggcagagcaggaagatcaggcacgtcttgatctggcgcagctggtagcggaaggcgaccgtctggcgttctccaccgacagttacgttattgacccgctgttcttccctggcggtaatatcggcaagctggcgatttgcggcaccgcgaatgacgttgcggtcagtggcgctattccgcgctatctctcctgtggctttatcctcgaagaaggattgccgatggagacactgaaagccgtagtgaccagcatggcagaaaccgcccgcacggcaggcattgccatcgttactggcgatactaaagtggtgcagcgcggcgcggcagataaactgtttatcaacaccgcgggcatgggcgcaattccggcgaatattcactggggcgcacagacgctaaccgcaggcgatgtattgctggttagcggtacactcggcgaccacggggcgactatccttaacctgcgtgagcagctggggctggatggcgaactggtcagcgactgcgcggtgctgacgccgcttattcagacgctgcgtgacattcccggcgtgaaagcgctgcgtgatgccacccgtggtggtgtaaacgcggtggttcatgagttngcggcagcctgcggttgcggtattgaaatttctgaatcagcgctgccggttaaacctgccgtgcgcggcgtttgcgaattgctgggactggacgccctgaactttgccaacgaaggcaaactggtgatcgccgttgaacgcaacgcggcagagcaagtgctggcagcgttacattcccatccactggggaaagacgcggcgctgattggtgaagtggtggaacgtaaaggtgttcgtcttgccggtctgtatggcgtgaaacgaaccctcgatttaccacacgccgaaccgcttccgcgtatatgctaataaaattctaaatctcctatagttagtcaatgaccttttgcaccgctttgcggtgctttcctggaagaacaaaatgtcatatacaccgatgagtgatctcggacagcaagggttgttcgacatcactcggacactattgcagcagcccgatctggcctcgctgtgtgaggctctttcgcaactggtaaagcgttctgcgctcgccgacaacgcggctattgtgttgtggcaagcgcagactcaacgtgcgtcttattacgcatcgcgtgaaaaagacacccccattaaatatgaagacgaaactgttctggcacacggtccggtacgcagcattttgtcgcgccctgatacgttgcattgcagttacgaagaattttgtgaaacctggccgcagctggccgcaggtgggctntacccaaaatttggtcactattgcctgatgccactggcggcggaagggcatatttttggtggctgtgaatttattcgttatgacgatcgcccctggagcgaaaaagagttcaatcgtctgcaaacatttacgcagatcgtttctgtcgtcaccgaacaaatccagagtcgcgtcgttaacaatgtcgactatgagttgttatgccgggaacgcgataacttccgcatcctggtcgccatcaccaacgcggtgctttcccgcctggatatggacgaactggtcagcgaagtcgccaaagaaatccattactatttcgatattgacgatatcagtatcgtcttacgcagccaccgtaaaaacaaactcaacatctactccactcactatcttgataaacagcatcccgcccacgaacagagcgaagtcgatgaagccggaaccctcaccgaacgcgtgttcaaaagtaaagagatgctgctgattaatctccacgagcgggatgatttagccccctatgaacgcatgttgttcgatacctggggcaaccagattcaaaccttgtgcctgttaccgctgatgtctggcgacaccatgctgggcgtgctgaaactggcgcaatgtgaagagaaagtgtttaccactaccaatctgaatttactgcgccagattgccgaacgtgtggcaatcgctgtcgataacgccctcgcctatcaggaaatccatcgtctgaaagaacggctggttgatgaaaacctcgccctgaccgagcagctcaacaatgttgatagtgaatttggcgagattattggccgcagcgaagccatgtacagcgtgcttaaacaagttgaaatggtggcgcaaagtgacagtaccgtgctgatcctcggtgaaactggcacgggtaaagagctgattgcccgtgctatccataatctcagtgggcgtaataatcgccgcatggtcaaaatgaactgcgcggcgatgcctgccggattgctggagagcgatctgtttggtcatgagcgtggggcttttaccggtgccagcgcccagcgtatcggtcgttttgaactggcggataaaagctccctgttcctcgacgaagtgggcgatatgccactggagttacagccgaagttgctgcgtgtattgcaggaacaggagtttgaacgcctcggcagcaacaaaatcattcagacggacgtgcgtctaatcgccgcgactaaccgcgatctgaaaaaaatggtcgccgaccgtgagttccgtagcgatctctattaccgcctgaacgtattcccgattcacctgccgccannnngcgagcgtccggaagatattccgctgctggcgaaagcctttaccttcaaaattgcccgtcgtctggggcgcaatatcgacagnattcctgccgagacgttgcgcaccttgagcaatatggagtggccgggtaacgtacgcgaactggaaaacgtcattgagcgcgcggtattgctaacacgcggcaacgtgctgcagctgtcattgccagatattgctttaccggagcctgaaacgccgcctgccgcaacggttgtcgctcaggagggcgaagatgaatatcagttgattgttcgcgtgctgaaagaaactaacggcgtggttgccgggcctaaaggcgctgcgcaacgtctggggctgaaacgcacgaccctgctgtcacggatgaagcgactgggaattgataaatcggcattgatttaactgcaaattgccggacagatctgcctgtccggcatactattcacgaggttttttcggacgatatttttccggcagttctggcaccggacacttgtcatcgatgagatgacgcacggttaagatcggatgacgccacagcattctcggcccggcccaacgcataatctgtttcatctcttcacgctttgcaggctggtaacagtgcaccggacactgcttacaggctggtttctcttcgccgaacacacatttatccagccgcttttgcgcgtaaacaaacaacgcctcgtaatgctccggctccgctgacgcctgcgggcatttcgcttgataaagatcgatcatttttttaatcgtcagtttttcacgagagatacgcttgccggacatactgcctccacctcattaagatgcatttatattacaacttaatcttaaagggcactatgactctaaagaagaagggttagccaaccgatacaattttgcgtacttgcttcataagcatcacgcaaaagctgcaaaacagcatctttcccggaaccagcatcaagaactcgccgttcgcttcttcccctgaaatgattaactccggtatcatgtgcgccttatgtgattacaacgaaaataaaaaccatcacaccccatttaatatcagggaaccggacataaccccatgagtgcaatagaaaatttcgacgcccatacgcccatgatgcagcagtatctcaagctgaaagcccagcatcccgagatcctgctgttttaccggatgggtgatttttatgaactgttttatgacgacgcaaaacgcgcgtcgcaactgctggatatttcactgaccaaacgcggtgcttcggcgggagagccgatcccgatggcggggattccctaccatgcggtggaaaactacctcgccaaactggtgaatcagggcgagtccgttgccatctgcgaacaaattggcgatccggcgaccagcaaaggtccggttgagcgcaaagttgtgcgtatcgttacgccaggcaccatcagcgatgaagccctgttgcaggagcgtcaggacaacctgctggcggctatctggcaggacagcaaaggtttcggctacgcgacgctggatatcagttccggtcgttttcgcctgagcgaaccggctgaccgggaaacgatggcggcagaactgcaacgcactaatcctgcggaactgctgtatgcagaagattttgctgaaatgtcgttaattgaaggccgtcgcggcctgcgccgtcgcccgctgtgggagtttgaaatcgacaccgcgcgccagcagttgaatctgcaatttgggacccgcgatctggtcggttttggcgtcgagaacgcgnnncncggactttgtgctgccggttgtctgttgcagtatgcgaaagatacccaacgtacgactctgccgcatattcgttccatcaccatggaacgtgagcaggacagcatcattatggatgccgcgacgcgtcgtaatctggaaatcacccagaacctggcgggtggtgcggaaaatacgctggcttctgtgctcgactgcaccgtcacgccgatgggcagccgtatgctgaaacgctggctgcatatgccagtgcgcgatacccgcgtgttgcttgagcgccagcaaactattggcgcattgcaggatttcaccgccgagttgcagccggtactacgtcaggtcggcgacctggaacgtattctggcgcgtctggcgttgcgtaccgctcgcccacgcgatctggcccgtatgcgtcacgctttccagcaactgccggagctgcgtgcgcagttagaaactgttgatagtgcaccagtacaggcgctacgtgagaagatgggcgagtttgccgagctgcgcgatctgctggagcgagcaatcatcgacacaccgccggtgctggtacgcgacggtggtgttatcgcatcaggctataacgaaganctggatgagtggcgcgcgctggctgacggcgcgaccgattatctggagcgtctggaagtccgcgagcgtgaacgtaccggcctggacacgctaaaagttggctttaatgcggtgcacggctactacattcaaatcagccgtgggcaaagccatctggcacctatcaactatatgcgtcgccagacgctgaaaaacgccgagcgctacatcattccagagctaaaagagtacgaagataaagtcctcacttcaaaaggcaaagcactggctctggaaaaacagctttatgaagagctgttcgacctgctgttgccgcatctggaagcgttgcaacagagcgcgagcgcgctggcggaactcgacgtgctggtgaacctggcggaacgggcctataccctgaactacacctgcccgaccttcattgataaaccgggcattcgcattaccgaaggccgccatccggtggttgaacaggtgctgaacgagccatttatcgccaacccgctgaatctgtcaccgcagcgccggatgttgattattaccggtccgaacatgggcggtaaaagtacntatatgcgccagaccgcactgattgcgctgatggcctatatcggcagctacgtaccggcgcaaaaagtcnagattggcccgattgaccgtatctttacccgcgtaggggcagcggatgatctggcttccgggcgttcaacctttatggtggagatgaccgaaaccgctaatattctgcataacgccaccgagtacagtctggtgctgatggatgagattgggcgcggaacgtccacttacgatggtctgtcgctggcgtgggcgtgcgcggaaaatctggcgaataagattaaggcgttgacgctgtttgccacccactatttcgagctgacccagttaccggagaaaatggaaggcgtcgccaacgtgcatctcgatgcactggagcacggcgacaccattgcctttatgcatagcgtgcaggatggcgcggcgagcaaaagctacggcctggcggttgcagctctggccggcgtgccaaaagaggttnnnnagcgcgcacggcaaaaactgcgtgagctggaaagcatttcgccgaacgacgccgctacgcaagtggatggtacgcaaatgtctttgctgtccgtaccggaagaaacctcgcctgcagtcgaggcactggaaaacctcgatccggattcactcaccccgcgtcaggcgctggaatggatttatcgcctgaagagtctggtgtaataataattcccgatagtcttttgctatcgggaatattaacgataactgacgaatcaaataaaaataccctgtataataggaaagcttattttacagggtaaaaccatgccatctacacgctatcaaaaaatcaatacccatcactatcgccatatatgggtcgttggtgatattcatggtgaatatcagttattacaatcccgcttacatcaactctcttttttccccgaaaccgacttacttatttctgtcggcgataatattgatcgtgggccggagagtcttaacgtcctgcgcctgctaaaccagccctggtttatctccgttaaaggcaaccacgaagcaatggcgctggatgcgttcgcgaccggcgatggcaatatgtggcttgccagcggtggtgactggtttttcgatttaaatgattcagagcaaaaagaagctacagatctgttgctgaaattccatcaccttccacatattattgaaatcactaacgacaacataaaatatgtcatcgcacatgcagattatccggggagtgaatatctctttggtaaagaaatagcggagagcgaattactctggcctgttgatcgtgtgcagaaatcgcttaatggcgagttacaacaaataaacggcgctgattattttatatttggacatatgatgtttgataacattcagacgttcgctaaccagatttatattgataccggatcgccgaaaagcgggcggctgtcattttataaaataaagtaatgaggccgggtaaagcaaagccactacccggcactttttattagcgcttaccttccgccagcagcggcgggatgctcggcaccattggcgcgtcatcaatatctttctgcgtcatgcggaacgcttcgggataatgttcgcggctggtacggcgcagcggttcggtatcgcgccaggtataaaggcaatgctggcactgatataccgtccagacatctttcaccggcgatttcgccatcacttcaatctgttcatcggcacaacgtggacaaatcatcttgttctccttatttacgtgcggccagcatagcggtcagtttttcagcccaggctttggtttccggcaaatccaccaccggctggctgtagtgaccacggttgtccggggcgacaggcgtggtggcgtcgataatcagcttgtcggtgatccccgccgggcttgagccagggtcgagttccagcacggacatattcggcaactgcaccaaatcccctgccggatttactttcgaggagagcgcccacatcacctgcggcaggttgaacgggtcaacgtcttcatcgaccataatcaccatctttacgtagcccagaccgtgcggcgtggtcatcgcacgcaggcccaccgcgcgggcaaagccgccgtagcgttttttggtggagataatcgccagcaggccgtgggtgtacatggcgtttaccgcctgcacttccgggaactcggctttcagttgttgatacagcggcacacaggtggctggccccatcaggtagtcgatttcggtccacggcatgccgaggtacagcgattcgaaaatcggcctggtgcggtaagagactttatcgatacgcaccacggtcatgttacgcccgccggagtagtgcccgctaaactcaccgaacggcccttcgatttcgcgtttgcggctttcgataaccccttcgaggatcacttctgaaccccacggcacatcaaaaccagtcaatggcgcggtggcgatcgggtacgggctttcgcgcagcgcgcctgccatttcatactcagactgatcgtatttcagcggcgtggcgcccataagggtgatgatcggatcgttacccagggtgatggcaatcggcagatcttcaccgcgctcttccgctttatgcagatgcagggcgatatcgtgcatcggcaccggttgcaggccgagcttacgcttgcccttcacttccatgcggtagataccgacgttctgcttgccgaagttatccgggtcgagcggatcgcgggaaaccacgcacgctttgtcgagatagaaaccgccatcaccgtcgtttaaacgaaacagcggcaggatatcgaacagattaatctcgtcaccatcgacggtgttctgcgcccaggctggattggcgcggcgctccggggcgatcgggaagttatcccagcggcggataaactcatcaatctgttttttaaccggggtgtttggcggcaggcccaaggaaatcgcgtggttctgccaggaaccgatggtattcatcgccacgcgggcatcggtaaaaccgcgaatattatcaaaccacagcgccggtgcaccatcgccgatacgcccggtggcgttggcagcggcagccagatccggttccgcgttcacctcttcgctgattttcagtaactggccgtggtcatcaagcgcctgtaaaaagctgcgtaaatcatcaaatgccattattcattctcctgagaaaaattccgggcctgcggcaatccttgccagcgcctggcgtagggatgttcaaggccaaattgatccagcacgcgggctaccacgtggtggacaatgtcatctaccgtttcgggatggttataaaaggcaggcatcggcggcaccatcgccacgcccatgcgtgaaagtgcgagcatattttcgagatggatggtgctaagcggcatttcacgcggcaccagcaccagtttgcggccttctttgagcacgacgtccgccgcgcgccctaccaggccatcagcgtaaccagcgcggataccggcgagcgttttcatactgcacggaataacgatcatgccgtctgtacgaaaggaacctgaggagatggtcgccgcctgatccgccgggttatggctgaagtcagcgagggcagcaacatcgcgggcgctgtaaggcgtttccagttcaatggtggttttcgcccacttcgacatcaccagatgagtctcgacattcggcatctcccgcagcgcttgcagtaatgccacaccaagangcgcaccggtagcccctgtcatcccgacgatcagtttcattgcttactctcttaattgttcgtatacgaacattattattaaaatacgcctctgttctcattgcggcaagcactgaaaagtaacaacatccccttcgtcactgaaaaaccgctatgatagcggcagatagtttgcccggagtttacatggcgttacgaaataaagcgttccatcagttacgacagctttttcagcagcacacggctcgctggcagcacgagttacctgacctgaccaaaccacagtatgcggtgatgcgcgccattgctgataagcctggtatcgaacaggtggcactgatagaagcagcagtcagcaccaaagcaacgttggcagaaatgttggcaagaatggagaatcgtggcttagtcagacgtgaacatgatgccgctgacaagcggcgtcgctttgtctggctgactgccgaaggagaaaagatacttgctgcggcgataccgattggtgacagcgtggatgaggaatttttggggcgtttgagtgcagaagagcaggagctgtttgtgcagctggtgcgcaagatgatgaacacataggatgcaaattgccgggtaggacgctgacgtgtcttatccaggcgacaaaaacacaagcttcccaaacaaaagaaaaaggccagcctcgcttgagactggcctttctgacagatgcttacttactcgcggaacagcgcttcgatattcagcccctgcgtntgcaggatttcgcgcaaacggcgcaggccttcaacctgaatctggcgaacacgttcacgggtgaggccaatttcacgacctacatcttccagtgttgccgcttcgtaccccagcaaaccgaatcgacgtgccagtacttcacgctgtttggcgttcagctcgaacagccatttgacgatgctctgcttcatatcgtcatcttgcgtggtatcttccggaccgttctctttttcatcggccaggatgtccagcaacgctttttcggaatcaccacccagcggggtgtctaccgaggtaatgcgctcgttaagacgaagcatacggctgacgtcatcaactggcttatccagttgctctgcgatctcttccgcacttggttcatggtccagcttatgggacaactcacgtgcggttcgcaggtaaacgttcagctcctttacgatgtgaatcggcaaacgaatagtacgggtttggttcataatcgcccgttcaatcgtctggcgaatccaccaggttgcgtatgttgagaagcggaaaccacgttccgggtcaaacttntctaccgcacggatcagccccaggttgccntcttcgataaggtccagcaacgccagaccacgattgccataacggcgggcaatttttaccaccagacgcaagttactctcgatcatccggcggcgagaggcgacatctccacgcagtgcgcgacgcgcaaaataaacttcttcttcggccgttaacagtggtgaataaccaatctcaccaaggtaaagctgagtcgcgtccaacacacgctgtgtggctccctgcgataacagttcctcttcggccaaatcgttatcactgggttcctcttctactaaggccttttcgtcaaaaacctcaactccgttctcatcaaattccgcatcttcatttaaatcatgaactttcagcgtattctgactcataaggtggctcctacccgtgatcccttgacggaacattcaagcaaaagcctggttccgccgatttatcgctgcggcaaataacgcagcgggtttacggatttccccttgtaacgaatttcaaaatgcaagcgtgttgaactggttccggtgctacccatggttgctattttttgccccgccttcacttcttgttgttcccggaccagcattgtgtcgttatgggcgtaggcactcaggtaatcatcattatgtttgatgataatcagattaccgtagccgcgcagcgcgttaccggcataaacaangcggccatctgcggtcgcgataattgcctgtcctttgctgcctgcgatatcaatccccttgttgcccccctcagaagcgccaaaggtttcgatcactttgccctcagtcggccagcgccaggtggagataggcgtactggttgatgtactgctgacagtcggctcggttgtgcttgctgttggtaccgttacaggcgctgtgaccgtggtcgcagttggcttgttgttcggcaacattttgttagcactctgttcacccgaagactcagaatacgtaattgtcggttgcgacgcaacagcaacggtggaattttgtgcaggcttgatcacaactccttgctctgctgcgtcggcctgggtaatggcatttccgccagtgattggcgtaccggaagcattacccacctgtaaggtctgaccgacgttcagcgcgtatggtgcctgaatattgttgcgctgagcaaggtcacggaaatcgttgccagtaatccaggcgatatagaaaagcgtgtcgccttttttcacggtataggtactgccgctataactgcctttcggaatgttcccatactgacggttatagacgatgcgtccgttttccatctgtaccggctgctgagctactggctgcactggctggatttgcggttgttgagtagcctgaatttgtggctgctgcaccggctgaatttgcggttgctgcgctgtagacgtcgtccccattttcggcggcggcgtaatcaacataccagaattggtatgtgcaggcgcattgccattaacggagctgaccggtgccggtggatttgaagtgtcagaacagcctgccagccatagcgaaaccagtgacaaagccgcaatgcggcgaacggtgaattttgggcttcccgcgctcatttatcccccaggaaaaattggttaataaccagtgacataattaccgtgcaaggcaccatactgaacactggaaaagatgttcacgatacgctgacctgcggcaaaataaccaggaaaaatccaggtatttcctcacgttttaagccagctcacccttcactaaagggacaaagcgcacggcctccacggtatcgataataaattcgcctccccgacgacgcacccgtttcaaatactggtgctcctcccctacgggtaagacgagaatcccgccttcgtccagctgcgtcattagcgcagttggaatttccggcggtgccgccgtaacaatgatagcgtcaaacggcgcacgtgcctgccaaccttgccatccatcgccatgacgggttgaaacattatgtaaatcaagatttttcaggcggcgacgcgcctgccactgcaagcctttaatccgttcaaccgagcaaacatgctggacaagatgcgccaggattgccgtttgatatcccgaaccggtgccaatttccagcacccgcgactgcggcgtcagctcgagtaattcggtcattcgcgccaccatatacggctgcgaaatcgtctgcccctgacctatcggcaaggcgatattgtcccaggctttttgttcaaacgcttcatcaacgaatttttcacgcggcacggcggcaagtgcattcagcacctgctcatcctgaataccttgcgcacgtaattgatccagaagtgcttgtacgcgtctgcttaccattgcgtgccaactcccacgctgtttaaccagtctgaaaccacatcttgcgcgctatgcgcagttaaatccacatgcagcggcgtgatggagacatagccctcatctaccgcagcaaaatcggtccccggaccggcatcacatttaccgcccggcgggccaatccagtacagcgtattgccgcgcggatcttgctgcgggatcacctgatctgccggatgtcgtgtaccgcagcgcgtcacgcgaatacctttgatttgatccaagggtaaatccggaacattaatattaagaatacgcccggtgcgcagcggctctttacacagtgcgcgcaaaattgaacaggttaccgccgcggcagtgtcgtaatgtttatgcccgtcaagcgagacggcaagcgccggaaaacctaaatgacggccttccatcgcggcggctaccgtaccggaataaataacatcatcccccagattcggcccggcgttaattccggacacaacaatgtccgggcgcggacgcatcagagcattcacgccaagatagacgcaatcggtcggggttcccatttgcacagcaatatcaccattttcaaaggtaaacgtgcgcagggaggattccagtgtcagagaatttgaagcgccgctgcggttacgatcgggggcgaccacctgaacgtcagcaaactcacgcaaggctttcgccagcgtttgtataccgggtgcatgtaccccgtcatcattactcagcaatatgcgcataatcacctgttgtgttgataagttccctgacaacgctggttgcaaaactacccgccggaagccagaaacggatttctacggtgacgtcatcccaccaattccagcttaattgttgcggatacagcagcatcgctctgcgcgcggcttcaactttttcgcgcaccagtaaagcttgtaattcagtttctgcggcgagagctgcctgttcgaatgccagcgcttcacgctgagttccccattcaccactgcccggcaatgcggcggttatcatcagctctttatcgttgacgcgacgctgtaattccaccagttcttcggtggttgcaacaaaccagctaccacgtccggctaattgtagcgcatcgccgtcaacaacttgattaacgtctgcttttttgaggcgctcagcaacaatctgattaaacaacgcactgcgggctgccgacaaccaaaaactccgtttattgcgatcgcgcaccggagtattggtttgcgcccagcgcagcgcgccctgcaagttgctaccgccaatcccaaaacgttgggcaccgaagtagttcggtacaccttttacgcaaatatcgatcagacgttgttcaacgtcatcgcgattgctcacttcgcgcagaaccagggtaaaggcgttacctttcagcgcccccaaacgcagcttgcgcttgtgccgcgcatactccagcacctggcagccttccaattgaaaggcgctcagatcgggcatttccttgcccggcacgcgagcgcataaccactgttctgtaacagcatgtttgtctttttgcccagcaaagctgacttcacgggcatgaattttcaggaatttcgccagtgcatccgccacaaaacgggtattgcagccgtttttgaggattctaaccagaatatgctcaccttcaccatcaggctcaaagcccaaatcttccaccaccacaaagtcttccggattggctttcagcagcccggtgccttgcggtttaccgtggaggtaagtgagattatcaaactcaatcattttgttgccttaatgagtagcgccaccgcttcacaggcaatcccttccccacgtccggtaaatccaagtttttccgtagtagtggctttcacgttaacatcatccatatggcagccgagatcttcggcaataaacacgcgcatttgtggaatgtgcggcaacatcttcggtgcctgagcgatgatagtgacatcgacgttgccaagggtataacccttcgcctgaatacgacgccaggcttcgcgtagcagctcgcggctatcggcacctttaaatgccggatcggtatccgggaacagtttgccgatatcccccagcgccgccgcgccaagcaatgcatcggtcaacgcatggagcgccacgtcgccatcagaatgcgccagcaatcctttttcgtaaggaatgcgtacgccaccaatgataattgggccttcaccgccaaaggcgtgtacgtcaaaaccgtgtccaattcgcattatgtattctcctgatggatggttcgggtgaggtaaaactcggccagtgccaaatcctccgggcgcgtgactttaatgttatccgcacggccttcgaccaactgaggatggaatccgcaatattccagcgccgaggcttcgtcggtaatagtcgcgccttcatttagagcgcgcgtcagacagtcatgtaacagctcacgagggaaaaattgcggcgtcagcgcgtgccataagccgttgcgatcaacggtatgagcaatggcatttttgcccggttcggcacgtttcatagtatcgcgcactggtgcggctaggatccctcccgtgcggctggtttcgctcaacgccaacaatcgcgcgaggtcatcctgatgcagacaaggacgagcggcgtcatgcaccaatacccactgcgcgtcgccagcggctttcaaacctgccagcacggaatcggcacgctcatcaccgccatctacaacggtgatttgcggatgattcgccagaggaagttgtgcaaaacggctatcgccaggacttatggcaatgacgacacgtttcacccggggatgcgccagcagcgcatacaccgagtgttcaagaatggtttgattaccgattgagagatattgcttaggacattccgtttgcattcgacggccaaatccggccgccggaaccacggcgcaaacatccaaatgagtggttgccatgttaattcccgggctgatttatcgattgttttgccccgcagactgtgcgcgcttcgacgcgtcaggcaccagacgataaaaagtttcgcccggcctggtcatgctgagttcattacgcgcacgctcttcgagcgcctcctggccgccattgagatcgtcaatttcggcaaaaagttgatcgtttcgcgctttaagtttcgcgtttgtagcttgctgtgccgccacatcatcattgacgcgggtatagtcatgtataccgttcttaccgaaccacagcgaatactgtagccagaccagaatagccagcaacagcagcgttagtttacccatcctgccccctgaaaaacggcatcatcatcccatgcatccgaagacgactctacatcctctgttggggataccgcgacaacgcgggcaaatgtaccacatttgtccattgttacgtatacccagggcgtgcagaacataatctcattattagttacggtttgaattatgaacagaggagacaagaaagtacaaattagcccagtagccacataaacagtgcgccaaacataatgcctactgtcatcagggtgaaaacaatactgtagcgtagctttccgtccatcaatgaatgcagcgcaatccccaccactaccgcaacgggcatcagcgccagaaagaaaggccaggtgtagataaagaagaacagcgtgttagagccataaatcaacatcggcatcgccagcgcaaataaccaggagataaaaccgaccacggcaccaggcagtgaccatgtggtttcttcatcctcagtaaggctgtcgttatttgttagtgtaatgttatggctattacgcatatttgatcctgttactttgacgaaccgggcatggaaacccggtggtgtctcaggatctgataatatcgttctgtctcaacagatctaataattgctgtaccaaatttgttactaattgttcaccattgagatgaatttctgccgattcaggcgcttcgtaaacggaatctattcccgtaaagttgcgcagttcaccggcacgcgctttcttatataagccttttggatcgcgggcttcgcaaatcgccagcggcgtatcgacaaacacttcgataaagcgcccttctcctacgcgttcgcgaaccatctggcgttcggcgcggtgtggcgagataaatgcggtcagcaccaccagtccggcttcaaccatcaaattcgccacttcaccgacgcgacggatattctctttacgatcggcatcgctaaaaccgagatcgctgcataatccgtggcgaacattgtcgccatccagcagatacgtactgacgccgagtttatgtaacgcctcctccagcgccccagcgaccgttgatttaccggacccggagaggccggtaaaccacagcactacaccacgatgaccgtggtgtagctcgcgttgttgcacagtgaccggatggctatgccagacgacgttttcgtcatgcagcgccattatttctcccccagcaaatcgcgnnnnccccagtgtggaaagtggcggcgaaccagggcattcaattccagttcgaatgcactaaattcagatggcgcagcagttgcctggctaactggctcatgcaccataccggcacctacggtcacattgctcaggcgatcgataaaaatcagcccaccggtaaccgggttttgctgataacgatctaacaccagtggctcgtcaaaagtgagatccaccaggccgatgccgttcagcggcaggttttcaacttcgcgttgggtaaggttattaatatcaacctgataacgaatgccatcaacacgagaacgcgtcttcttaccggcaattttgatgtcgtaactctggcccggggaaagcggctgttccgccatccataccacatccaccgacgcgctctgcacagctggtaacgcttcgtctgccgccagcagcagatcgccacggctgatgtcgatctcatccgtcagcaccagggtgatagcttctccggcaaaggcttcttcgcgatcaccatcaaaagtcacgatccgcgcgacgtttgattccacaccagagggcagcacttttacacgttgcccgacttccacgcgaccggatgccagcgttccggcgtagccacgaaaatcgagatttgggcggttaacgtactgcaccgggaagcgcattggctgggcatccaccactcgctgaatctccacggtttccagcacttcgagcagtgtcggaccgctgtaccacggcatactttcactttgcgaagccacgttgtcaccttccagtgcggagagcggcacaaagcggatatccagattacccggcagctgcccggcaaaggtcagataatcttcacgaatacgggtgaacgtctcttcactgtaatccaccagatccattttgttgatcgccacgaccagatgtttgatccccaacagtgtggagataaaactgtgacgacgggtttgatcgagcacgcctttacgggcatcgatcagtaagatcgccagttcacatgtcgatgcgccagtcgccatattgcgggtgtactgctcgtgccctggagtgtcggcgataataaatttacgcttctcggtagagaaatagcggtaggccacgtcaatggtgatgccctgttcacgctcagcttgcaggccgtccaccagcagagccagatccagcttttcgccctgggtgccgtgacgcttactgtcattatgcagcgatgagagctgatcttcatagatttggcgggtatcgtgcagcagacgaccaatcagggtacttttgccgtcatcgacgctaccacaggtcagaaaacgcagcaggcttttatgttgttgcgcaatcatccaggcttcgacgccgccttcattggcgatttgttgtgcaagtgcggtgttcatcttaaaaatacccctgacgttttttcagctccatagaaccagcttggtcgcggtcaatcacgcgcccctgacgttcactggtggtggaaaccagcatctcttcgatgatctccggcagcgtttgtgcatttgactccaccgcaccggtcagcggccagcagcccagcgtacggaaacgcaccatccgttttttaatcacttcgcccggttgcaggtcgatacggttgtcatcaatcatcatcaacataccgtcgcgttccagaaccggacgttccgcagcgagatacagcggcacaatgtcgatattttccagccagatgtattgccagatatcctgctcggtccagttagagagcgggaaaacgcggatgctttcgcctttgttaatctgcccgttatagttgtgccacagctccgggcgctgatttttcgggtcccagcgatggaagcgatcacggaaagagtagatacgctctttagcacgggatttctcttcgtcgcggngcgcaccaccgaaggcggcatcaaaaccgtatttattcagcgcctgcttcaggccttcggtcttcataatatcggtatgtttcgcgctgccgtgcacgaatggattaatccccatcgccacgccttccgggtttttatgcaccagcagctcgcagccgtaggctttcgccgtacgatcgcggaactcatacatctcacggaatttccagccggtatcgacatgcagcaacgggaaaggcagcgtacctggataaaacgccttgcgcgccagatgcagcatgacgctggaatctttaccgatagagtagagcatcaccggatttgagaattctgccgccacctcgcgaataatgtggatgctttccgcctccagttgccgcaggtgagtaagtcgtatttgatccataaccgttcctttgcaataccgctattttcttgccatcagatgtttcgactatagggagcgtaagagaacgaatgaaattaccaattagaatgagtagttccttaacggaataacgatttggcaaagctaatatcaaaaagtgcttaaggcaccggatttcgggcgtttaggaagatttgaaattgttttagcgcagcggcagtttcatactatggcggtaaaaaaatttgcatggtatttaaggactcactatgttttccgcattgcgccaccgtaccgctgccctggcgctcggcgtatgctttattctccccgtacacgcntcgtcacctaaacctggcgattttgccaatacacaggcgcgacatattgccactttctttccgggacgaatgaccggaacacccgcagaaatgttatctgccgattatattcggcaacagtttcagcaaatgggttaccgcagtgatattcgtacgtttaatagccgatatatttataccgcccgcgataaccgcaaaaactggcacaacgtgacgggaagtacggtgattgccgctcatgaaggcaaagcgccgcagcagatcattattatggcgcatctggatacctatgccccgcagagcgacgcagatgcagatgccaatctcggcgggctgacgttacaaggaatggatgataacgccgcaggtttaggtgtcatgctggaactggcagaacgcctgaaaaatacgcctaccgagtatggtattcgatttgtggcgaccagtggagaagaggaagggaaattaggcgctgagaatttactcaagcggatgagtgacaccgaaaagaaaaatacgctgctggtgattaatctcgataacttaattgttggcgataaattgtatttcaacagcggtgtaaaaacccctgaagcagtaaggaaattaacgcgcgacagggcgctggcaattgcgcgtagtcatggaattgccgcaacgaccaatccgggtttgaataaaaattatccgaaaggcactggatgttgtaatgacgcagaaatattcgacaaagcgggcattgctgtactttcggtggaagcgacaaactggaatcttgggaataaagatggttatcagcaacgcgcaaaaacagccgcattccctgcgggaaatagctggcatgacgtaagactggataatcagcaacatattgataaagcacttcctggaagaatagaacgtcgctgccgtgacgttatgcggataatgctaccgctggtgaaggagttggcgaaggcgtcttgatgggttggaaaatgggagctgggtgttctaccgcaggggcggggaattctaagtgatatccatcatcgcatccagtgcgcccggtttatccccgctgatgcggggaacacagcggcacgctggattgaacaaatccctgggccggtttatccccgctggcgcggggaacactttatacacggatcctgtgtgccgtggaccgccggtttatccccgctggcgcggggaacaccacaaaccgcccatcttcccgattactgcagccggtttatccccgctggcgcggggaacacactaagcatacatatctgtttttaaacaaatttattccacatcaacaatctaccaactaaattcaaacatttccttatttttaaagaacacataacctattgattatcaacaggaagaaaagaaaccaaacgtaacccatccaaatccaccggaatacgtctgttttctccccaggtctgaaattcaaaacccgactcggtattggtcgcccaggccatcaccacatttccgcaaccagccagttgggtaatttgctgccagatcatctcccgaatacgttttgatgtatcaccaacatacacaccggcacgcacttccagtagccagattgcgagccgtccacgtaagcgcggagggacattttctgtaacaaccacgaccatgctcatccgccgcgcccccggtgaccactatcacccagcgtttcaggttcagggatggcaggcggtaacatatccggcgcgggttgtggtggttcaatttcacctgcagcaaggacttcctcaattaacggtattaatttgcccgttaacttagtgctacggaaaatatcgcgacaggctaatctgacttctttatcaggttctgcgggttgcctcgctgctatttcaaatgcctttggcacaaccgaatcaaatttaatgatatcggctatgtcataaacaaatgaaagcggtttgccactatgaataaatccaatagcgggcgcatatcccgcggctaatactgccgcttcagaaataccgtacagacatgatgtggcagcactgatgcagcgattcacaacatcgcctttttcccagtctttaggatcgtatttgcgaccattccatttcacaccatattgtttcgccagtaatgcataggtctggcgaacgcgggatccctcaattccccgtagctgatccactgaacagcgagctggcggtggctcacgaaaacgtaattcatacattttgcgcaccaccttcaggcgtagatcttccgttaaagccagctttgcctggtagagtaatttatctgcccgcgcccctccgggttgtccggaagagtaaacgcgaacgcccgcttcaccgacccagaccagcagtgttcccaccgtggcggccagatgcaccgccgcgtgggaaactctcgttcccggttcgagcataatgcaggcgaccgatcccaccggaatgtgcgtgcggatcccggttttgtcgatcagcacgaaagcgccgtccagtacgtcgatttgaccgtactggaggaagatcatagaggtgcgatcttttaacgggatcggactcagtggtacaaacgtcacacctctgctccgggtttgatcagcatcagaccacagccgaacgcgcggcttttgccatacccctgactgagacgttgcagaaataacccgggatcggtgaccgtaagcatccccgtataatccacgctactgaactggatcagttgccgggagttttcccgccgcagttgctgttgtcggtaggcatcaaccgaggtatccagcagtgtaaaaccgcttctctccccctgcgctgccagccagtccagcgccgcctgttgttgatgcaaccagacatcacttccttccgcctgccccctcacctgccgtttcgcctccatcagcagatcgtggcgcttgcccgctttacagattgttggattcgcccgcaggttgaaacaaagttgttgtccggtacgcagctcgggcacaaatgaccggcattcgatggtgaacgtttcactttccgccgggcgttcctgcgacagtacaaaaaagcgaaacgcgccctggagttcttcccgacgataaagaaattgcctttctttgccgccagggaagagatcccacagccactgatgcatcacatattccccgcgatccaccaaatgcagcaactgcgcaggcgaaagctggccggtatgtaaggttattcttgagaggtacatggttcctccttgctgagccacggcccctgattgatggtgcgttccccaaacagccactgctgacgatttaaaggaacatctcggcgacgtaatattttgctckcgaccaggccgtcgtgttccccttcccaccagcattcatcctgaagtttcgggagtgagactttcagttcgcggaaactatcctgatactgttggtatgcgttacgtaagacatcagacgcgttgccttcgagcagtaacggcgcaagtggtaacgccagcggatgactttttcgccccagataaagcggaaaaaccggatgacgtaaaccgtcctgcaactgttcaaggctgtaaggcgcatcgggggttgttgccaccgccaccatccaccaggcatcggtgtagtagtcgcgccgggagataatcgcgctcagaagatcaggggcgctcaactcttcgcgacggctgaaataacgcgctttacgcacctcttttggcatctggaccgtgtgataatcccgtgcccagcgcgggttacggctggcgcaaaccaccagtgaatagtggcggttaaacgcgtttaatcgttcggtatcatcacgccgaatccctaccccggcagccagcagccccagcaatgctgagcgcgaaggcagttcatgggtatgacgcacttcgccgggggcatcgacgccccaggatgccattggcccatgaagctgaaaaatcaaatattggctcattagccgccccttacgcgcagataaagtccagcacgtccttcatgcttccctgtttgttcatcacgtcaaagcttgcgcattcggtcttctgttcatagaccgtattcatattttcgcgaagcgttgtaatacgctgcaccgccacatctaactgccgggtgccattaatgggttcatagaaagccgccgccagagaacgtggttgttcggtgcctttttctgccagcgcccaggaggcgtaggcacggctggcaaagctgttctgtttgccggttggggagactttaagtgcggcttccgtaaaggcgcgcaaggtctgattagctaacgcttcgtcaccgccgaggttttcgaccagcagatctttatcgatgcagatataggtgtagaacagcgcagaaccgaatccggtttcaccaagatgcccggcaccggcatcttcagaagcctggcgcaaatcatcaacggcggtgaaaaaatcatcttcgacaatcgtttcactgacaccaaatgcatgcgcgacctggcaggcggcttcaacattaaattcgggtttattcgccagcatacgaccaaacatagcgatatctaccgccatgcgatctttacgtaacaaagcgagatcttcctcttttggcgcgcgcttttcttcggccagttgatgggccagcgctnttacggcgtcanattctgccgggctgatatggactaattgttcagtttcggcgttagtgagcggatcttttggttttttgtcgtttttagctttcccaagataatccgcaatttttgccgcccattcgatggctnttttctcttcgatgcctttctcaatcaggatagttgccgcctcacgcgcaatacgcccactgcgaataccaatatggcccgccagtgcctgttcaaaaagtgcagaagtgcgccacgcacgtttcagactttgcgaggaaacgcgcagtcgcgttgctccacccaggaccacggttttcggcgctccggtgtcatcacggttaaggttggctgcagggtaagcggttaacaaatgaagctgaataaatgtcgtcatgagatagtcctttattgattttgttcgttatcgacgtcgccagcctggtaatattccagcgcccagcggatacggataaattcggttggccgctgatgacggcggtgatgattgagcagatcgtcgctctcctggcaccagcggaagacaccctctgccagagagtcaagattaacggaaccgtttaataatctgactgcgcgacgtaactggcgcagtaattcatccggtgtttttactgccgacaggcgagtaaaacgcccctttgacattaccgccgccagctgcgcagcaaaaggcagccgttcatcaatggctttaacattagcgctaagtgcggctatcagcgccagtgcggtaatacgccattcaggttcatcctgccactttatttgtctgttcttcagaaacaggcgaaatccatccgtcagacaaacatcattaaccgtcgtactacgccgcagactggcacgttcgccgcgtttctcctgcaattcctcatgccatttgcgcagcgtggctttgtgctcctcttttacaatactcattcagcagcctcctgctttttctccctggcggctttagcactttgcttctccgccgatgttgtaaaatatttcttgcgcncggtcatgacgcgttccaaatcaacgggctcataaggattggtgaatacacgctcgtcaaaatcctgacgtgcgaataaccaaatttccttttgccatttgccgagtaattcatccgcatcctgaccttcttcaatttggcgcactaacctcaggaagcgatgctgagttttgttccagaagtcgatatccacaaaactgaaatcaccccttgcaccttttggatcggagaaccatgcttctttcaatgcactccgtaacagactcagaatccgtgaagccgtttgcgcagccagccgcagcttcggtatctggccttcttttttattgagcagcagcgggaaatggtgttcgtaccaacagcgcgctttcatgttgtcgaaatcataaccaaatccccacaggcccacttttgcctgtttcagactgctggcattaaagagtttcaccaccagcgcgggaagttccgtattgttttctgacttacccgtttcgataaggcctaaccagtcgcgccagattaaaccgcccggttgtggtttaacggagtaaaactcaccgccctctttaagtggtacacggtaaggcgttaagggatgctgccacatggcataattcgcaccgtaatttttggtagtcatcaaactcagaagcgcgtcactctgctcaccgcaaatatcgcagttgccgactgtcgtggtattaaaatcaatacgaatacgccgcggcattccccagtacgcctggagtttattgacctgatcatcggttaccaccgcaccggccagttcgctggtacgcgtcgggccaagccaggggaaaaccagatcgtcaaattttttgggtagcggtaagtcggcttcatcctgcggcatcacgttgagccacagtttgcgccacaagggggcttgttgattgccctgatactcctgcaattcaatcagagtcgtcatcgncccaccgccgcgtaaaccggtgcgatagcctttgccacctgacggcacatttaactgtagggagaacagagctaacgcagaacaatgagagcatacgtgttcagtcacgccacgcttaataaagtggtctttattaaacttcgttgtttgagcgccgggaatctcaggcagtagcgaagcgacctgaactttatcgcccatgagcacctcgaaatcctgcataaatgaaggtgaatctgggccaaactggaaagcgtgttctaatgacagcaatgcttcccgtagcttttcagcttccagcccgtcttcccagatatcatcccaacgacgataatcttttggcgcgaaactgctttgtagtaaccccagcaaaaactgccatgccgccccctggagatctgcccgcggcgcagcgatatcgacaacattttcatccgccagatcgactggcgccagcttgcctgttgttccgtctttaaaacgaacgggcaaccacggggttgtcagaagtgaaaacgagttcatatgtatcctctcgtaaaaaagaccatccctggtcggttgtccatcattccatccttttcggtgtatcaactattcagagagtcctgtcgcaggtatctcaatcaaccttgccaatcaatccctccctggccgaatacccgcaactttcgtcatcagtgactaaaatcacgtttgccatttccggatcttgccgctgttcaatgcaccactgcctgaacgcttccccttccagtaaagaaaactcatcccgatgttttttccaccagcttcgacgcactctgacaacgctcatttcccatgcgtgagcaccggtggcataaggcttcaccacaccggcaatacaggtagccagccacagggaaacagattcctcagccagacgtgtcgacagcttttccggaaggtaatcgttgatattggcggcatagccaggcttgaagttcaggacaaactttttagccattgcgcgatcgcagtaatatttgcccacttgctcctgctcgctgcgggcaaatccttccggcattaccacgtcctcaccgtagactgattcaataagaaggcgggctgcgtgtggcatttgaatagcgccttgctcacgcagtacacgctgcgtcagccagattcgtccatgatcgggatagacatatgcactgttacgcatggcactgccgaaccattcgtcaccaggagcgtcgtcccagacgggggccagaatcagcaattcaggaggggaacgctcgtcttttccgtcacgctttaactgaccattaatatcgcggatatgccgctgtaatcgccccgctcgctgaatcagcaaatcaacaggggccaggtcggagatcatttcgtccaggtcacaatcaacgctctgctctaagacctgagtacaaatgaggacttttccggcacgctgtgaaccgtcttctttaccaaagcgtgccagcgtctccatttcaattcgctggcgatcgctaaaagcaaagcggctatgaaagagtgaaaggctggaagcgggaatgacgccgcgggcaagcagctgacgatgaaccttaatagcgtcatcgacagaattccggatccaggcgatgcattttccctgacttaccgccgattcgatacgcgcaatactctcttgttcactatgaagccaacccacgctgacgctacgctcaacgtctttgcgcgtcgctacccggtgtgagttcacatcggatttcgtgacatgcgtcagccaggggtaatcatccttttcaaggaacggagcttcttgctggccctctgtgccacgcgcaaaggcggcgacgagtttgtcgcgctgctgttgggataacgtagcagaaagcaaaatgacgcagtttccgccacgcgcctgccgctcgatcagcccttcaagaatgcacgacatgtaagcatcacaggcatggatctcatcagccagcaggattttgttactcaaccccagaagccgcagattattatgtttaaacggcatcactgccatcatcgcctgatccagcgtgccgacgccaatttcagccagtagcgccttcttgttactgttggcaaaccaggccgcacatccctgactgaatgtttgttcatccggttcttctgacccgactaaatcaccggaccagagtgattcattgaagcggtccattaatgtgcgggcactgtgtgccagcaccaagctggggcgggactctggcgaatagaaagcaagccaggttttgaccagccgatcgtacatggcattggccgttgccattgttggcaggccaaaaaacaaaccctgtgctttcctcgcagccatcaacctgtgcgccaggataagcgccgcttctgttttacctgcgccagtcacgtcttccagaataaataactgtggccctggctggctgatatccagatccagtaccttttgctgtaatggtgtcgggtgctcaataaaaggaaacagcgtattaattccggtgaaaggtgcggtttctgcttttggaggaaagacggttaaggcgttttgagcctgaactaaagttttctgccagtaatctttaatatccattgggtgtgcgacgcgtggaaaaaatcgcgttgacgaacccgtccagtctgcgagtacgactgttgcagagatataccaggaaagttgttttaaaagttcaacgccctcgtcatcatcccagaatgtgggaatctctatgagcggaaacagtgccttgatttcaaggagaaaatctcgcgcggcagctttgtcttcaggcagaaaattatccagctcatcaatacggtcaggtggtcgaccatgatgcccggtagttatggacatccacatctctattacacgtgtaagtttacgagaagagagtgaagatgaaggaagcaactcctcacattcacttaaataataattccacagccagtaacccagcgttgaatgagagatcttttcgtaattctttctggaaccttccggaatcttgagttcaggggccaggtaaagttgctgaaaagagcgggcaaattttccaatatcgtgccagcacagcaaccaagcgaaaaattgagccgcctgttccttgtcagaaatccctaattgacgaaagtaatcagccagcccgaagcaatttcttttaaccattaaatagcccattgcggccacatccagcgaatgccagcaaagaaggtgatagccgtcgccaccctctttctcgccacgtcgggtttttccccagaaatcaaagaaagtcacaatatttttatccttcagtaaacttaaaggatatttacgcatattttaaaaattatctgtgatatatatcagccaataaacatttatattatgaataaattaatgattttcatttgaaattcataatgataaatagagactatatattcacataaannannnnnntttaaaaaagggtgcaggagaccaaaccatcacaattcaatacgcggggttttacccccgcgtggtggctacttcttcgattcgtaagcgagaactgccttaaactccataccacgctctctgatactcaactcacataacgagtcgcctaccatgagcgtgaatcccagtactgtacaacacagtactatgattgccacaagggcatattttgttagcatgtcttgcctccctgcaaagaagagactaacatccgaattgctacgttcgaacgcgagcctcaggttgatagaaatatcgcctggggcttttgtccatctggaacctcgcgaatgcttaacgccagacagcctcaagcacccgacgccattctatacctgataattcttccagcggcgttcacgtttaaaatcaggaatgctgctcgcaaaataaaaacgcccccatcattactgacagaggcgtttaatttatccgacaatatttacccttcgtgtaacccacattccctttttaagccaaagaaacgcgtttcttcttccgccatgccgggttcccatttacgggttgtatgggtatcgcccaccgataaatatccttcgtcccataatgggtgatatttcaggccattcttttgcagatactgatatatcgttcggttatcccagtcgataatcggcagcactttaaatacgccacgctgaattgccagcaccggtaaattggcgcgactgccggattgttcacggcgcaggccagcaaaccaggtttgcgcgttaagttctttcagcgcccggttcatcggttcgactttgttgatgtcattgtacttttcaatgccttcaacgccctgttcccacagttttccgtagcgtgcttcctgccaggctgcgctttcggtagcacggtacactttcaggttgagcttgagtttgtccgttaactcgtcaataaagcggtaggtttccgggaacaagtaacccgtatcggtgaggatcaccggaatatccgggcgaatttgattcaccagatgcaggctcaccgccgcctgaatgccaaagctggaagaaagtacatattcaccgggcagattatccagcgcccaggctacgcggccttcagcgtccagtttttccagttgggcgttagtttccgccagcgccagaatgcgatctaccttcggcagttcgttcagggcgtttagatcgagtttggacatagattcctcactgtttgccttgcctgatgcgacgctcacgcgtcttatcaggcctacaagaccgggctgatggttaatcccacaaatcgcgcgccggatcgagcaccgggcgaatgatgcccgcacgcaccgtaaagtcgccgaagccttcacccgcttcgcgctctttcgcccagcgccctatcagttcatcaagcgacgccaggatttccggctcggtgatgttttctttatacatccgtgggatacgtgtcccaatgcggttgccgccaagatgcaggttgtagcgacccggcgctttacccaccaggcccacttccgccagcatcgcgcgaccacaaccgttcgggcagcctgttacacgcatcacgatatgctcatcgctgacaccatgtttcgccattaaattatcgatgttgtcgataaaagacggcaggaaacactccgcttccgccatcgccagcgggcaagtcgggaacgagacgcaggccattgagttttcacgctgcggcgtgacggcattcattaacccgctctctttggcgatcttctcgatcttcgctttctcgctttccggcacaccggcgatgatcagattctggttcgccgtaatgcggaaatcacctttgtggatcttcgcgatctccagcaggccggttttcagcggacgccccggataatcaaggatgcgaccattttcgataaacagcgtcaggtgccagttatcatcaatgcccttaacccagccaatacgatctccgcgtccggtgaactcatacggacggatcggttcaaatttgatcccnnngcgacgctccacttccgctttaaacgtctcaacccccacgcgctccagcgtgtatttggttttggcatttttacgatcggttcggttaccccagtcacgctgagttgtcacgacggcttccgccactgccagcgtatgctccagcggcagatagccaaactcactcgccgtgcgggcgtaggttttcttgttgccgtgttcgatagaaagcccaccgcccaccaacaggttaaagcccaccagcttgccgttttcggcgattgccacgaagttcatgtcgttggcgtgcagatcgatatcgttctgtggcgggatcactaccgtggttttgaatttacgcggcaggtaggtctggccgaggatcggttcttcatcggtggtggcgactttttcctgatcgagccagatctccgcatacgcgcgggtacgaggcagcagatgttcagagattttcttcgcccactcgtacgcttctgcgtgcagctgcgactcgtaagggttcgaggtgcagagtacgttacggttcatgtcgttagcggtcgccagcgcatcaagaccgaccgagtgcagcatctggtgcaccggtttgacgttctttttcagaatgccgtggaactggaatgtctggcggttggtcaggcgaatgctgccatagatggtgttttcaccggcaaatttatcgatcgcctgccactgtttggtggtgataactccacccggcagacggcagcgcaacagcatcgcatggcgcggctccagcttctgttcagcacgttcggcgcggatgtcgcggtcatcctgctgatacatgccgtggaagcggatcagcaggaagttatcgcccttaaagccgccggtcaggccgtcgtttaaatcttccgcaatggtgccgcgcaggtagttgctttcaagcttcatgcgctcggcgtctgtcagttttccttcgaccactaaaggccctggatgtttttcgctcattagtagacatctcgctgataacggcgctctacgcgcagctcacttaaaaattcatccgccgcttcggtgtccatgccaccaaattcggcaatcacttccagaagtgcctgctcaacgtctttcgccatgcgattagcgtcgccncagacataaatgtgggcaccgtcattgatccagcgccacagctccgcgccctgttcgcgcagtttgtcttgtacgtaaactttttctttttgatcgcgcgaccaggcaagatcgatacgcgtcagcacgccctctttgacgtaacgctgccactccacctggtagaggaaatcttccgtaaagtgcgggttgccaaagaacagccagtttttacccggcgcttcgtcagcggcgcgctnnngcataaaggcgcggaacggcgcgatgccggtgcctgggccaatcataatcaccggggtttccgggttagcgggcaggcggaagttatcgttatgttcgataaatacgcgaacttcgccctcttcttccacgcggtccgcgaggaagctggaggcaccaccggcacgggcgcggccttccacgtcgtaacgcaccacaccaacggtgacgtgtacttcgttctcgacttcctcctgcgaggaggcgatggaatacagacgcggcgtcagcgggcgcagcagattaatcagcgcttcggcgtccagttgcgccggagagaagcgcaccatgtcgacaatcggcgtagtcgcggcgtaatgctgtaacttcgctttatcgcccaccagcggcaacagcgtttcgctgcgggtaagcgtggcatagttctcaacaatattggcggtgttgacggtcagttcgaagtgccactgtagcgcttcgttcagaggcaacgttttgccctcgacggtgacaggttcatcgcctttcagccacagcagttcgacaagttctttcaccagtgccggatcgttctgataccagacacccagcgcgtcacccggctggtaacgcaggcccgagtcacctaagtcaatttcgatatggcgaacgtctttttcagagttacgcccggtaattttctggttaaccgaaaggctcgctaccagcggcgcgtctttgctgtacgggctggtgtggatttcatttaccacgccagtagcgacggattgcgaaggtgccgcgacaggcgcacgcgatttaagcgcatcaaccacgcgggcgcgccactcgctggcagcagcctggtattcaacgtcggcgtcgacacggtcgagcaggcgttcaccgcccagttccgccagcttgctgtcgaaatctttcccggactggcagaaaaattcataagaactatcgccgaggctaaacacggcaaaagcggtattttccagcttcggcgcttttttggagaacaggaacttatgcagcgcgacggcttcttccggcggttccccttctccttgcgttgacgtcaccacgataagcagtttttcgctggcgatttgtttgaatttatagtcgcccgcgttcaccagcttaacgttcagttttgccgtcaataaatcatcgcgtaatgcttcagcaacccggcgcgcattgccggtttgcgaagcagagataatagttatacccggcatttctgcggctggcgctggcgtcgnnnnaagcgcagcaggctgctgattgagcacgccccagaaatagccagaaacccaggcaagctgggtgggagttaaatcggtcgtggccgcctgaaggcgtgccagttgctccgggttcaacggaagcaacgcggaaggtgggacctgtgtcgtcatgcgtcgttatgttccagtaagcaaagctgtttctgcgccctgtcagcgcccataaaacagaagagaaggtaaggttaacggggtgaacggtgtggattaaagacgggatagcgataactaataaccaaatcgactaacctgttttagcaatagtctttaacaacaaaatagattaaccaacctaatgaaaaacaaatgaatttagccaatcattaagataaatcagcgattttgcgcaacaaagtcgttttagataatgcgaaaaaagagcctttccggtactctacggcggttttatcgtcctgtagagaaattatgatgtccaccacgttatttaaagatttcaccttcgaagccgctcaccgcttaccacacgtcccggaagggcataaatgtggtcgcctgcacgggcattcctttatggtgcgactggaaattaccggggaagtcgatccgcatacgggctggattatcgatttcgctgaactaaaagcggcgtttaagccaacttatgagcgcctcgatcaccattatctcaatgatattccaggtctggaaaacccaactagcgaagttttagcaaaatggatttgggatcaggttaaacccgttgtgccgctgttaagtgcggtgatggtaaaagaaacctgcaccgctggttgtatctatcgcggcgaatgataagagtgtggcggcggtcaatttcccttaagtaacgctatgttagggtgttgtgttcaggatatctggggcatgacatggaagacgactgcgacattattattattggtgccggtattgcaggcaccgcttgcgcgttacgctgcgcgcgagcgggtttatccgttttgttactggaacgcgctgaaatccccggcagcaaaaatctttccggcgggcggttatatacccatgcactcgcggaactcctccctcaatttcatctgaccgcgcctcttgaacgacgcatcactcacgaaagcctttccctgttaacgccggattgcgcaacgacgttttccagcttacagcccggcggtgaatcctggagtgtactacgtgcacggttcgatccgtggctggttgccgaagccgaaaaagaaggtgtcgaatgcatccctggtgcgacggtggatgcactgtatgaagaaaacggcagggtgtgtggtgtcatttgtggtgacgatattctccgcgcccgttatgtggtgctggcagaaggtgccaacagcgtcctggctgaacgtcacgggttagtgactcgtcctgctggcgaagcgatggcgttggggatcaaagaagtgctgtcgctggaaacatccgctattgaagaacgttttcatctggagaataacgaaggcgcagcgttgctgttcagcggcggaatctgtgatgacttacccggcggcgcatttctttatactaatcaacaaacgctctcgttagggattgtttgcccactctcttcccttacgcaaagtcgtgttccggcaagcgagctgcttgctcgctttaaaacgcatccggcagtgcgcccgcttatcaaaaacacggaatcactggagtatggtgcgcatctggtgccagaaggtggcttgcacagtatgccggtacaatacgccggtaacggctggctgctggtgggcgatgcgttgcgcagttgcgtcaataccggaatttctgtgcgcggcatggatacggcgctaactggcgcgcaggnggcggcacaaacactgataagcgcctgccagcaccgcgagccgcaaaatctgtttccgctttatcatcacaacgtagagcgcagcctgctgtgggatgttctacagcgttatcagcatgttccggtgcttttgcaacgcccgggatggtaccgtacgtggcctgcgttaatgcaggatatttcccgcgatttatgggatcagggtgataaacctgttccaccgctgcgccagttactctggcgtcatttacgtcgtcatggcttgtggaatctggcgggcgatgttatcaggagtgttcgatgtctgtagcccgtaatctctggcgcgctgctgatgcgccgcacattgttccggctgactccgttgagcgtcagatggtacaacggttgattaacgcctgtccggtaggtcttttttcgctcacaccggaaggtgacttacgcgttgattatcacggctgcctggggtgtggcacctgccgtttgctgtgcgacgaatccacactacaacagtggcgctatccgccttccggattcggcatcacctaccgatttggataaataataaggataatttatgcccntcttacacctgctccgccagaatccggtgattgctgccgttaaagataatgccagcctgcaactggccatcgattctgaatgccagtttatttccgtcttgtacggcaatatctgcaccattagtcaaatcgttaaaaagattaagaacgctgggaaatatgcttttattcatgttgatttgctggaaggcgcgtcaaataaagaagtggtgattcagtttttgaaactggtgaccgaggcggatggaattatcagcaccaaagcatcgatgctaaaagcggcaagagcggaaggttttttctgtattcatcgcctgtttattgttgattcgatttcgtttcacaacattgataagcaagttgcgcaatcgaatccggattgtattgagatcctgccaggctgcatgcccaaagtgctgggctgggtgacggaaaaaatccgccaaccgctgattgctggcgggctggtatgcgatgaagaagatgcgcgtaatgcgattaacgcgggtgtcgtggcgctttccaccacgaataccggagtctggacgttagcgaaaaaattgctttgacgggataatcgtaaccaattgaatttggtttgatttgtaggccgcacgccacatccgacattcagcgcctgatgcgacgcttaacacgtcttatcaggcctacaggtccccagtccagaaccgtaggcaggatcatccggcagcacgttattggcattctgcgtcaatgtttgtcaccagtgcctccagcatcactttccagtcatcaaccacgccaacatctgcctgtgaaaataccgctgcgctggcgtcatgattaatcgccaccacaaacttgctattgcgtacgcccgccattaacgctgctgcgccagaagcgccaacaacaatacacacctcaggtgccagcagatgtccggaaataccaatcactttttcagcatcaacgccaccgttcatcactcgcgcccgactgtagcccacttcggctcccagcttttatgccagcatagcgatttcctggttatctgcctctccgccctgccccaccaccaacacccgtctggcctcagctaatgggtcgcgggtaacatttttcaggttctctatgctaaccagccagtccggaagcgcacctgggactatgttcagttgctgcataccagagggcaacgtggcatttttatctgctcccgcctggcgcgccagggaaagacatagcgggcgtttttctgtttgcagcgtcgccgttagcgcatttccccagtgggatttgcgcacgcttacgattggaatctctaacgaagtcacctggcagatgcttgcaccatgtaaacgccaggccagccgagtcgacagttcatcgccaaacgttcccggcggaaagagaacaacgttcgcaggcgttcgctgccactgttccaccagcgcatccagcacctgttccaccactacgggctgtggttctatttgccagtgcgccagggtacaaccgctgaaatcctgcgccgccagccagcccgctaatgcggcattctcctgatttattgtcacaattgcgatattcatggctgcatcctttggcgtaaatagtcctgccatagcttttgcgctttttctgctaccgtttgcccatcaatcagcgtcgctccgcgtcgttgctctgctcttgccagttgcagacactgcatcgctggcaattcggcagcaacagttttacggataatttccgctttccccgcagccattcgctggcgcattcccggtactggcaaggccacttcaccgcactgacgcacggcaatcaccgtaggcaagcgaatccgacaacagcgcagcccatgttcagtacgctgttcgagggtgataaacggcgcgtcgagagtgaaacgctccacctgggtgaagcaaggccagcccagcatttccgccagcaaaaatggcgtttgcccattctgcccttcgctgctttggcagccggtaattatcagatccagcggattctgacgctgccattcggcaatatggcgagcgacaaattccgacgcaaagcgcagatctgccgccgtctccagcaatacagcttcctcaaacccaagagccatgagatagcgcagccagtgcaacgcccgttcatcccccatgctcaacgcggttaaagacatcggcgtaccgttttttctctgcgccaacagcagcgcggcggcagcctgttcatcagcaccgagtaaacttcgcagtagcgaaatatccggtccgctattaccatgagccgccgcctgccactctttttccgccagcattccggcatccggttcggctttaaacgctaacagaatgttcattcgcacctcctacatttcccgccgccaccagcgggagtgctttggtttctggtgcccatagccaggttacaacaaaaccagccaacaacactgccgccaggagcaataaggtgacttgcattccccactgcgccagcacccacggcagcaggccagtacttaccgccgcccccaaccgactcatggcggtggcaaaaccgacgcccagcgagcgaatgtcagtaggaaaactttccgcaggcaaaatgcccaccagattactgactgccgaaatggtggtgctgaagagaacaaaagcagcagcgttaatgaactgccggaaggcaaacaggccatcactaccagcgttgccgccagcagcaaaaaacttcccagcaaaaatttgcgatgtgccagcaggtgcgtcagaactaatcccagcagcgcgcccacaattaacaacgcattaagcatcaggctggcagtcagcgcatcttccagtccaatagtctgggcgatagttggcagccaggtataaatcacaaaccatgggattacgaggcagacaaagaagacgctgttaaacgccgtgcgccgccagtagcgcgaagagaacaaggttttgatgtgtttatgggtcgccgttgccacttcatcgcccagtaaaacatggggaccaaaatagcgatgcacgatagcgtgagcttctgcaaaacacccctggcgcagtagccagcgtggcgattctggcgttccccagcgtaataacgtaatcaacaacgcgggcagagctgccgatgccagcagccagcgccaggcctccgggttttcggaaataaagtgatgtccggcaatacttgccaacacatagcctacggtccacaccacgctgaatgcgcccagcaaaacaccgcgatggcggcgcggggaaaattcagccagcaaggtgtgacctactgagtaatcgcctcccagaccaatgccgatcaaaatgcgcagtccaataagatgctctggcgtggtggcaaaaaattgcaagaacgaagcgagcgtaatcagcaaaaagctgaaggtgaagattttttgccgaccaatatggtcggagatccacccaagaaccaggctgccaagaaacaaaccaaggtgcgccgagccgccaatcattcccgccataaacggcgtcagttgcatggcgggcgtaagttgaataatggcgtaaccaatgacgccgagaacataaccgtcggtcaggtgtgcgccgaaagtgagcgcagcaattcgacagtgaaaacggttaagcggtaaatcatccattcgcaccggtgaagtgttcatctttaccccttcattgtccggtaataagaacggcttctcgcctgagaagccgaaaaggcaacgccccatcatcgcggaacgctgcctgacacattatttttcaatcggatagatagtacccgtattcataatgccattaggatcgaactgctttttcagcccttccagcaacgcccacgcgctgccgtgttccagcttgctccagtgaacgcgatgtttaccgataccgtggtggtgcaccatcgaaccaccgaggcgaatggtttcttcgcaaatgattttgttgagcggattgtggtacttgtcgatttcctcttccggcttacagttgacaacgttgtagtcgtagacgaagtacatgttggtgccgttctgatagctatgagaggagtgaccgcccagcatggtgatgtcgtcggcgtgcgggaactcggtacgaatacggttaataacgctttcgtagatttcgtggatgcagctccagcagccggacacttcggtagtaaagcccatgttgccggttttgaggatctgcacacgttcggcagccactttatccggtccccagttcaggttgttaaaccaggtttcgatcagcttgctgtccacgcgttggcattgcgggtagcgggcaacgatttccgcaatcccttcgcccgtcgccttcgcaatgcgagggttaccttcagccataaagatcagcacgcattttccgtcggcaaaatgggtgaagtgttgggtgccatcttcagcgtcatacaaacgagcgatcgacggacgatacccttccaccatgatttcacgcaggatgttgaagccggttttcatgtcttccaggatatagccgtagaagaggttgttttccggggtgaatttaaagattttcactgttacttcagtgatatagcacaatgcaccttcgttgccgatgatgatgtgacgaatgtccgggccagccgcgcggcgtggcacgtttttaatgcgtgtgacggtgccatctgccaacactgcctccagaccaacgaccatatcttcgattgcgccgtagagtgtggagaactgcccgatactgcgggttgctaccaggccgcccatctgcgccagcggctttgactgcggagaatgccccgtggtgtaacctttttcacgcaacgcgttttccagcacctccagcggaacaccacattgcgccgtcgcctgcatattctcaatatcaatattaatgatttgattcatggcgggaccgtcgagcaccaccgagttttctacaacagtttccagcccaccttcggtggcggaagcaccggtacgcggcacaccgttaattttgtgcgcattcataaaattcagcacacgggatacttgctctgtggaaccgagttttacgaccgctgccggaatcggcaaagtataaatgccatgaatatccggaaatttacgaaaacggtcaatactgttcttctttaatactgtttcatcggtaattacgcgatctgcaccaacaatttcctttagctggtcgacaatcgctgcgcgagataaagacatagtaattccttcctgataataaaaatggaataatcattaataagagaaaacagaaaccaccgttatgggttagcgcactaaataaccgccatcgaccactaataaatgcccgttgacataattcgatgcctgacttgcgagaaacacggctgcgcccattaaatcctgagtatcgccccaacggtttgccggaatatgatcaagaacgcgctgattggtttctggattactgcgtgtcgccagcgtaatgtctgttgcataatagccaggggcgataccatttacctgaatattatattgacctagttcatcacaataagctttggtgaatccggcaagagcatgtttagtagcagaatatgcaggtgaccattgtccacctaagtaagagaacaatgaacagatattaatgattttaccgcttttctgcgggatcataatttttgccgcttcgtagcttaactcgaatgcggcggtcaggttcacatcaatcatcgggtcccagtcggcacgaccgaagtccagcaccttattcagcttacaaataccggcattgttaaccagaatatcaactgtaccgaaacgctcacagcaggcagcgataatcttctgcggcgcgccttctgcggtgatatccacctgcatgaagtccacctcaacaccctgattttcaatcatttcctttgtttcgccgttatctttgacaaaacttggaataaagacatttgcgcctgctttggccaacgccatggcaaatgcctggcctaaaccgctattcccgccggtaacaattgcggttttacctttcagggagaaaaaatccattgagaacgcattgagagattcgattgacatagttagctccaatttccgtaaggcaaaaaaaaagaaaggtaacttcccccgcgagagggaagttacctttctcattatctctggtaactggagataatttttagcataaggacataactgctaatgtgatcgtaatcacagtgtgatattcgtattatcaaatagttttaaaaagcagaagcgtgattactctcacacaacacctctgctttccatgttatttattatttcaattactagagacctgagaaaagtaatccacctgaaagggcggcttacttttctcttttttttgtctattacaaatgggaatacgatatgcaacacaactcatatcgccgttggataaccctcgcgataattagttttagcggcggcgttagtttcgacctggcttatttacgttatatttatcaaattcccatggcgaaatttatgggattcagcaataccgagataggtttaataatgagtacctttggtattgcggctattattctttatgcccccagcggcgttattgccgataaattttcacaccgcaaaatgattacttccgcgatgatcattaccggattactgggtctgttaatggcaacgtatccaccgctgtgggtaatgctctgtattcaggtcgcctttgcgataacaacgattttaatgctgtggtcggtgtcgattaaagccgcatcgttgcttggcgatcatagcgagcaagggaaaattatgggctggatggaagggctgcgcggcgtcggtgtaatgtcgctggcagtgtttaccatgtgggttttttctcgctttgcaccggatgacagcaccagcctgaaaacggtcattatcatctatagtgtggtttacatcttgttggggattctgtgctggttttttgttagcgataacaacaacctgcgcagtgccaataacgaagaaaaacagtcattccagcttagcgacatccttgccgttttgcgtatcagcaccacctggtattgcagcatggtgatttttggcgtcttcaccatctacgccattctgagttactccaccaactatctgaccgaaatgtatggcatgtcgctggtggcggcgagctacatggggattgtgatcaacaaaatcttccgcncgctgtgcggcccacttggcggcattatcaccacctacagtaaagtgaaatcccctacccgcgtgatccaaatcctttccgtactcggcctgctggcgttaactgccctgctcgtcacgaactctaacccgcaatcggtcgcgatggggattggcctgattttactgctgggattcacctgttacgcctcacgcgggctgtactgggcctgccctggcgaagcgagaacaccgtcttacattatgggcaccacggtaggtatttgctcggtgattggattcctgccggatgtnttcgtttacccaattatcggccactgacaagacaccctgcccgcagcagaagcctaccgcaatatgtggctgatgggcatggcggcgcttgccatggtgattgtctttacctttttgctgttccaaaaaattcgtactgctgatagcgcccccgcaatggccagcagcaagtaagccaggaaaattacaggagaaaaatcatgtcgaagaaatacatcatagggattgatggcggaagtcagagcacaaaagtggtgatgtacgatctggaaggtaacgtggtttgcgaaggcaaaggtttattgcagccgatgcacacgccagatgccgataccgcagaacatcctgacgacgatttatgggcatcattatgttttgccggtcacgatttgatgagtcagtttgccgggaataaagaagatattgtcggtattggtctgggatccatccgttgctgccgtgcgttattgaaagccgatggcacgcctgctgcgccgttgattagctggcaggatgcacgcgtaacgcgtccctacgaacacactaatcctgacgtggcctatgtcacctctttttcgggttatctgacgcatcgcttaaccggcgagtttaaagacaatatcgccaactattttggtcagtggccggtggattataagagctgggcatggagcgaagatgctgcggtaatggagaagtttaatatcccccgtcatatgctgtttgatgtgcaaatgccaggcactgttcttggacagatcacaccacaagccgcgctggcgacacatttcccggcagggctgccggttgtttgtaccaccagtgataaaccggtagaagctctgggagccggattactggatgatgaaacggcggtgatttcactcggtacttatatcgcgctgatgatgaacggcaaagccttgccgaaagatccggtggcgtactggccgattatgtcttctattccgcaaacattgctgtatgaaggttacggtattcgcaaaggcatgtggacggtgagctggctgcgcgacatgttaggcgagtcgttaattcaggatgccagggcgcaggatctttcaccggaagatttactcaacaaaaaagcttcttgtgtgccacctggctgtaatgggctgatgacggtgctggactggctgaccaatccgtgggaaccgtacaaacgcgggattatgatcggctttgattccagcatggattacgcatggatatatcgttcgatactggaaagcgtggcgctgacgctgaagaacaattacgacaatatgtgtaatgaaatgaatcactttgcgaagcatgtgatcattactggtggcggttcgaacagcgatctgtttatgcagatttttgccgacgtgttcaaccttccggcacgacgtaacgccattaacggttgtgcaagtctgggggcagcgatcaatacngcggtaggtctggggctatacccggattacgcaacggctgtcgacaaaatggttcgcgtgaaagatatctttataccgattgagagcaatgccaaacgctacgacgcgatgaataaaggtattttcaaagccctaaccaaacatactgatgtgatcctgaaaaaatcgtatgaagtgatgcatggggaattggggaatgcggattcgatccagagctggtcgaatgcgtaagtgaggaagaccgggcgggaaactgcccggcctgaacatacctgaatggttatccccgctggcgcggggaacataagttcgacaacttaaaaaatgataacaagtccggtttatccccgctgatgcagggaacataataaaaactttaactagttcggtttatccctgtttttacaaggaatattaactacactcgatgtctttagaataaaagacaatacgaatcgcactttatcaattttcacttaaagtatgaactggatatctttattcataagaactattcatcaacagcgtatagaggcggttatgtaaaaccactcattagcctcaaaacaaagacaaatttccagatttattacttaatcaatgaataacaagattaaaaaacaaactatcaacctaaagaaanntaatagacattaattcaatttaaaaaaataatagataaaatttcttaatggattaaatatcatacaaataacactttaattaaatttgattttttgtatcgataattgtgaacttttcatatatggagagctattttgaacatgaggggttacgtggatatgttgcttattacgagtactgctaatataaaaacttgagaaagagataacgggttatatggtggtttatccccactggcgcggggaactcctcgactttaattttttcgctgcccgcttttgcggtttatccccgctggcgcggggaactctctaaacataacctattattaattaatgattttttaagccagtcacaatctaccaactttacagtatcacacaaacaacacatccattatgttaaagagcacttaacccattgattaaaaaggtaaanatttaaaataactctatacaaactaaaatctaccaaactttaccgcaataattttcactccagcgaaaaattaacgccacagaatttgtagagaatgataatgattagtccgggataggcaagatggatgagttttcagagacgacaaagaatataaatgagtagaagtctttacaggttccacccatttataacgcttataaatgtttaatcaggcaatatttaaatatttatgggtttgcatcgacaaacgccaattacgcgcaatgcaggtttcaatgcacaaacgtgtggcatcatccttttggctaatcggctgcagtgcaatgactcgcggtttatcatcggtcagcgtcgccaaaagttcatccagtgcttcaatatcacgtacgcgtcccactggatgcttgatttcgttggctcgctccagtgcctgtgacaacacttcatagccgccgcgcatgttcagctttggcgatacggtaacccaggtattcggtgtacagcgtacttcatgagtaccactggtttcgatctggcagctaaaaccgttcttttcgagcaggtcagtcagtggcagcaaatcatgaatgcaaggctcaccacccgtaatcaccacatgccgcgcggtatatccctggcgaccaatgacagccagcaagtnttcactgctcgccgccccccacttatcactctctttggtcttcgccagaatgctgaaaagggagacttcccgatcctcaagcttttcccaggtgtgtttggtgtcgcaccaggcacagccaaccgggcatccctgtaaacgaataaaaatggcggggacgccggtaaagtaaccctcaccttgcagggtctggaacatctcgttaatcgggtactgcatagcattctctgtgaagtggataattgttaattattgcagatcctgccacaacaatcatgtcttattaacattctgttacaggcaggtttatggcaaaaagtggattagatcataaagaataaaatgaagcagagtattatgttttaaggaattaattaaaagggatttaaacacgctcagaatattcatcgtaattatatttattttcaatttatcaggctgtggatataacgatattcaaacctatgatgagcaggttaacgcctcctggtctgaggtattgaatcaatatcaacgtcgcgccgatcttattcctaatcttgtcgccagcattaaaggttattccagccatgaacgagatgtactggaagccgtaacattggctcgtagccaggctaatcgcgccagtagcgatnttcagcaaactccgggagatgaacaaaaattacaagcctggcaacaggctcaagcgcaggtgactcgcactctcggtcagttaacgataattagtgagcgttaccctgagttaaaatctcaggaactctatcaaaatttaatggtacagcttgaaggaagtgaaaatcggattgccgttgcgcgaggaagatatattaaagccattgaacaatataatgtcactatccgcaaattccccgctgtattaaccgcaaaggtcatggattacacaccaaagaaaaattatttgccggatgatgtcgccgcagtaagtaaagccccaacaatagattttagccagaatgctaatgctcattaagcggggaagttctatgcgaaattttatcttccttatggctttcttctgttcatctgtgtttgccacacaaattccagtacctgaatcacccaagtatgtgaatgacttaaccggcacattaacaaacagcgaagtaaacaccctgaccaaccagattaaagccctgacgcaaaaaaactacgcacagttggtcgtgttagtggttgaaacaacaggcgatgaaaccatcgagcagtacgcgacgcgggtattcgatagctggaaaccgggtgataaagaccgcgatgatggcgttctactgttagtcgcctggcaggatcataccgtgcgtattgaaatcggttacggactggaaggtattattacggatgcgcagtccgggaaaattattcgcaacagtattattcctgcatttaaaaaaggcgacctggctggtggtttgcaaaagggaatcagcgatattgaaagtcgtctgacggggaataatttagcaacgataacaccgaccgatcaccctttgccctttagcggttggtgggcattgttagtctgggcgatagtactgacgtttatttctgccagaggatatatcaaaacgctgggagtaatttgcttcgcagctattgtactggcctttgttttacctatagcgggcttcagcggaagctggggagtactcgcaacattactctgcttcgccacaccgttcctggctgtcgccatcgcttttacccccttcggcaaaaaagttcgggatttgatgtgtgatgccaaccagccatcacgccatacaagaagcaattcttcctcccactattcatcatcgtcatcctcttcattcgacaatgacaattttagcggtggtggcggttcatctggtggcggtggcgcttccgggcgctggtaacaaaaggaattgatatgcgtatttttctcttacttctgatgctatgcggttttcaggtattcgctgaacgattgccttcagtgactgacttaaccgggacattaacgacagaagaacaaactgctttaactcaacaattacagactctcgagcagcaaaaccacttccaggtggccgtgttggttacgccgaccacagggggcaaaaacattaaacttgcagcctcgcagagatacggggtatatcactggaaacccgttggagagaagcgatatggcgaaggtatcttaattctcgtcgtatggccggaagggctggcgtcaatgaagattggacatggactggaagagatgttgccgccggaacaagctgcgcaaattgttcgttaccatatgcagccagaattcgaaaaaaacaatctctttgctggattaacgggcggaattgaaagcatcgcacagtttacccatatcaaagcgaaccttagccctttggatgctttagccaatcatctgtttgctaatccgcaacgttcgctgccatgtcttgcctggacactgctgatgatcgttgccatcgttgtcctctggctatttgccagccgcccacggcgtggcatatggatgatatcgatgattacccctatggtctggtttttctcctttcaggacgatgtcatcattcggcgggtatcggtcgtttgttttagtttattgttagcaacaacctgcaagcagcgtctcgcggtagtttttaatatgtgccgcgtatttcctatgatgctgaccccaaaaaataaaaacgctaaagtgaaaaaacaaaagaagactccgcaggttcgtgaatcaggacgaaattcattgtttgtcgtgatgctgataattattgtgggatggtgcctggtgttcgccagtaataaagatattgcattcatctcaacaattattgggttaattgatcattttatcggcccaataaccattgctggcatcgttctgctgatcattgtggccaaatttactggcaatcttaagctggggtcaggagaaaaaagcaacaggaaaacggggaatcgtaatgctcattctcgctcttcgtcgagaaattctttccgcggtggtggcggttcttcaggaggcggcggttcatccgtccgttggtgatcgtaatgcgcttaatctttattctattcactttgtggtgccttcctgggctnnnccagcaaattgctgtgccggaactgcgccaacaggtgaccgatattactggtacgttaagcacttctgaacaacaatcactgacacagcaactgcaggatattacacataaaacacgggcgcaggtcgctgtattagtagtgccgtccaccggagacgattccattgaacaatatgctacaagggtttttgatagctggaaactgggagataagcagagaaacgatggtattttacttctggttgcctgggaggatcatgctgttcgtattgaggttggctacgggctggaaggggtggttaccgacctgcaagcggcgaagattatcagggatatattgatccctgccttcaaaagtgatgacctgatgggtggattaacactggcaagcgaaaatatcggcgcgcttctgttgaatggtgaattaccggaagacaggggggattattacagtatcaatccccctattccattatcgcttgctgtaattatattgctggcggtactttcatattttattgtttttaccgatccgtcgaatttaccctggatcactctcactggcgccatttacgggatggtattcctctatgttgccgagccaggaccatggaccaatttaatcgttgcctgcggtatgttaacgccttttgcgatcgtaccactggttattttttggcttatcgtcaataaaaagctacgcgccaaatacaaaaaactcagtaaagatagagcttcaagaaaaggttcttcttcatcctcttccggtggcggctcaagtggcggaggctcaggcggcggatttagcggcgggggcggttcttctggcggtggcggcgcgtccggtcgctggtaactcaaccataaaaaacgccagcccgaaggctggcatttttaaatcanataaagtcagacttatgcctggcctttgatctctttacgaccgttgtacggtgctttttcgcccagagcttcttcgatacgaatcagctggttgtatttagcaacgcggtcagaacggctcatagaaccagttttgatctggcctgcagcagtaccaacagccaggtcagcgatggtagcgtcttcagtttcgccagaacggtgagagataactgcagtgtagccagcgtctttcgccatcttgattgcagccagagtttcggtcagagaaccgatctggttgaatttgatcaggatggagttagcgatacctttttcgataccttctttcaggatcttggtgttggttacgaacaggtcgtcaccaaccagctggattttgtcgcccagaactttggtctggtatgcgaaaccatcccagtcagattcgtccagaccgtcttcgatggaaacgatcgggtactgtttggtcagttcttccaggaagtgagtgaattcttcagaggtgaatgctttgttgccttcgccagccagaacgtatttaccgtctttgtagaattcagaagctgcgcagtccatcgccagagtgatgtctttgcccagttcataaccagcagctttaacagcttcagcgataacagccagagcttcagcgttggaacccaggttcggcgcatagccaccttcgtcaccaacagcagtgttcatgcctttcgctttcagaacttttgccaggtgatggaaaacttcagaacccatgcggatggcttctttcacagttttcgcgccaaccggctgaatcatgaattcctggatatcaacgttgttgtcagcgtgctcaccaccgttgatgatgttcatcatcggaaccggcatggantntttgcccggagtgccgttcagttcagcgatgtgctcgtacagcggcatacctttagcagctgcagcagctttggcgttagccagagatacagccaggattgcgttcgcgccgaatttggatttgttttcggtgccgtccaggtcgatcatgatcttgtcaatgccagcctgatctttagcatctttgccaatcagcgcctgagcgatcgggccgtttaccgcagcaacagctttggttacgcctttacccaggaaacgggatttgtcgccatcgcgcagttccagagcttcacgggaaccagtagaagcacctgacggagcagctgccataccgacgaaaccaccctccagatgtacttcggcttcaacagtcgggttaccacgggagtcgatgatttcacgaccgatgatttttacgattttggacattaggttttcctcaagtcactagttaaactgaaactccagacaaacaacgcgtacccagggtacgcgttgccgttctaacttttttacttacttcgcctgacgtttctggaactcgctggcggctttcacaaagcctgcaaacagcgggtgaccatcacgtggagtagaagtaaactccggatggaactggcaagccacgaaccacgggtgattcggaacttcgatgatctcgaccaactgatcatccccggaacggcccgcaacgcgcagacctgcatcttcaatctgtttcaacagcatgttgttgacttcgtaacggtgacgatgacgctcaacaattgtcggcgcattgtacagctggcgaaccaggctatcgtcaaccaactggcactgctgtgcgccgagacgcatggtaccgccgagatcgctcttctcgctacgaacttcaacgttgccgttttcatcgcaccactcggtaatcagcgccacaaccgggtacttacagtctggcacaaattccgtagagttggcgttctccatgttggcaacatggcgagcgtaatcaattaacgccacctgcatacccaggcaaatgcccagataaggaatattgttctcacgcgcaaaacgcgcggtcgtaatcatgccttctacgccacgatagccgaaaccgccaggtacgaggattgcatccagacctttaaggatttcaacgccgcgcgtttcaacatcttgtgaatcgatcagtttgatgttgacgctgacacgattcttcagcccaccgtgtttcagtgcttcaatcacggatttgtaagcgtccggcagttcaatgtacttgccgaccataccaatggtgacttcacttaccggattcgcttcttcgaagataacctgttcccattcggacagatttgcttccgggcagtttaagctgaatcgtttacaaatataatcgtccagcccctgagatttcaacaggcccggaattttatagatggaatcgacgtctttcagagaaataaccgctttttccggaacattacagaacaatgcaatcttcgcacgttcgttcgccggaacggcgcgatctgaacgacaaatcaggatgtcaggctggataccgatggagagcagctcttttacagagtgctgagtcggtttggttttgacttcaccagacgctgccatgtacggcaccagcgtcaggtgcataaacagagtgtgctcacggccaatttcaacagccatctggcgaatcgcttcgaggaacggcagggattcgatatcacctactgtaccgccgatttcgaccagtactacgtcatgaccttcgccaccttccagcacgcgctctttgattgcgttagtgatgtgcggaataacctgtacggttgcgccgaggtagtcaccgcggcgttctttacgcagaacgtcagagtagatacgacccgtggtgaagttgttgcggcggctcattttggtacggatgaaacgctcgtagtgccccaggtccaggtcggtttcagcgccgtcttcagtaacgaacacttccccgtgttggattgggctcatagtacctggatcgacgttgatgtacggatccagtttcatgatggtcacattgaggccacgggcttcaagaatggctgcgagggaggctgcggcaatgcctttacccagagaggatacgaccccgccggtcacaaaaatatagttcgttgtcatgctgaacctgagaagttaggttgaaaagacgatggaataaccaggacgggaaagcagtatacccgaacatgacctgtgccacaaactttcattatccctcctcttcgccagcgcactattgaaatcaggagtgagaaaatagcccctttggggtaaatgtttttgacgcaaatcaagcnnnnnnnnnnnnnaaaatgacacaaatggcgcttgaccgcgtaattcccttagagatcaatttcctgccgttttacctgttgccagacttcttccattgtttcgaggtcaacacctgtcatttccagtccacgcgcggcaacaatacgctccacttcgcgaaaacgacgctcgaatttttcgttcgctttttgcaatgcgatttccgcttttgtccctaaatgacgagccagattgaccgtggcaaacagcaggtcccccatttcctcctccagtttagcctggtcgacaacagcctgccgcgcttcgtacatcacctcgtcgatctcttcgtagactttatcgactaccggaccaagcgtcgtccaatcgaagccaacgttggcgcaacgtttctggattttttgcgcacgcattaaagccggtaaactacgaggaatatcgtccagcgccgaatgctgcgctttctgnncgcgctcttcggttttgatttgctcccaacgggcaagcacttcactactgttttcggcagaactgtcagcaaaaacatgcggatggngacgctctaatttatcgctaatcgcagcgcaaatatcattaaagtcaaagcgcccttcttcctgagccatttgggcgtaaaacaccacctggaacagcagatcgccgagttcaccgcgcagatcgtcaaaatcttcacgggcgatggcgtccagcacttcgtaggtttcttcaagggtgtaaggcgcaatggtggcaaatgtctgctctttatcccacgggcagccgttttccgggtcgcgcaggcgctgcataatagtgagcaaacggtcgatttgattcattagaatgtcctgaaaattgcgggtccgtcaggtggaaacctgtgaccagaatagaagtgagttagtaacactacccaatcagtacgttaattttggctttaatgagttgtaattcctctggggcaaccgttcctttcttcgttgctcctcttgcccgccaggcgatactttttacctgatcagctaacgctacgccatcacgttcctgaccggataaaacaacttcgaacggatatccttttgattgcgttgtacaaggaacacacagacacatacctgttttgttgttgtacatgaacggactcaggacaacagccggacgatgtccggcttgctcgctaccttttgtcgggtcaaaatcaacccaaatcagatcgcccatatcgggtacgtatcggcttaccattaccagacttccttatctttcggctctccccagtcgatattctcgtggaggttttccggcgtgatgtcgttgaccagttcagcaagcgtaaatacgggctctttacgcactggctcaataattaatttgccatccaccaggtcaatcttcacttcatcatcaatattcagattgagcgcctgcattaacgtagccgggatccgcaccgccggtgaatttccccaacgctttacgctactgtggatcataaccctttcctcaaaccactatcatatgtagatacagtatatatcaatctacattgtagatacgagcaaatttcggcctaactcccgtgcaaccgacgcgcgtcgataacatccggcacctggttgagtttacccagcacgcgccccagcacttgcaggttgtaaatctcaatggtcatgtcgatggtcgccagttgctgtttggtgtcgctacggctggcaacgccaagcacgttcaccttctcgttggcgagaatggtcgtgatatcacgtaacaacccactacgatcattagccaccacgcggaccaccagcgaatatccggcggagtagctctcaccccataccgcgtcaacaatgcgttctggcgcatgggagcgcagttccgccagttgttcgcaatcggcgcggtgtactgaaataccgcgtccctgggtaatgaagccgacaatctcatctccaggaatcggctggcagcagcgcgcgatgtggtgcatcaggttaccaacaccttcaaccactacacgaccgttatctttactgcggttttgcggcgtgtagcttttttgctgaagctgtttcagcgcggcggcgtcctgctcttcggcactcggcttattaaattgcgattgcaggaagttcaccatctgattgagacggatatccccgccaccaatcgccgccagcaactcgtcgacatcattgaagttgtaacgcggcagcagatgtttttctgcttctttcaggctgatccccagatgttccagctcgtcgtcaaggatttgccgcccagccagaatgtttttgtcacggtcctgtttacggaaccaggcgtgaattttcgaacgcccacggctggttgtgacgtaaccgaggtttgggtttaaccagtcacggctggggttcggctgtttctgggtgataatttcaatctggtcgcccatttgcagctggtaggtgaacggcacaatgcgcccgccaatttttgccccgatacagcggtgtccgacatcactgtggatgtggtaagcgaagtccagcggcgttgatcccgcaggcaaatcaacgacatcacctttaggcgtaaagacgtacacccggtcgtcaaagacctggctgcgtacttcgtcgagcatttcgccggaatcagccatctcttcctgccacgcaatcagtttacgcagccaggcaatccggtcttcatgtcccgaacgtgcgccgccagcagccgcgccctctttatatttccagtgcgcagcaacacccaactctgcatcttcatgcatctgtttggtgcggatttggatctcaacggtttttccacccggccccagaaccacggtatgaatagactgataaccgtttggtttcgggttagcgacgtaatcgtcaaactcatccggcaggtggcgatagtgagtgtgcactatccccagtgcggcataacaatcctgtaaacgctcggcgacaatacgtaccgcacgcacatcaaacagctcatcgaaggcgaggttctttttctgcattttgcgccagatgctgtagatgtgtttcggacgaccatacacttcagctttaacgccttcagctttcatctcagcgcgcagatgaccgacaaactcttcgatatagtgttcgcggtcgagacggcgttcatgcaacagttttgcgatgcgtttgtattcggtcgggtggagataacggaagcagtaatcttccagctcccatttcagttgcccaatcccaagacggtttgccaacggcgcgtagatattggtgcactcttttgccgccagtacgcgttcatcttccggcgcatcttttacttcacgcagatgagcaatacgctccgccagtttgatgaccacgcagcgaaaatcatcgaccatcgccaataacatccggcgaacgttatcgacctgttcggaggaaacagaatcagtgtgcgtcgctttcagctggcggatcgccgccatatcacgcacgccgtgaataaggttaacgaccgacttaccgacgctctcacgcagcacatcttcgctgactacgttggcatcagccagagggaacagcagcgccgcccgcagcgtgtcaatgtccatacttaatgtcgagaggatctccaccatctcaacaccacgccacaataacagactggcatccggatgcccctgcgtctgttgcagacaatacgcccaggtttcggctaagcactcacacgacttctggctggtaatacccagacttgcgatccatttttccggatcaaattcaccagccttattgatatgtgcacttcttaccgcaaccatcgtcctctcctttagggaccagacctgccgaaatcggcaaatcgcaactatttaacgcgcgagaaaagtaccatcgattccagatgtcccgtgtgtgggaacatatccagcatcgccagtcgcgcaatggtatatcctgcttttaataacgcttcgctatcccgagccagcgttgcagggttacaggatacataaactatacgaataggttccagttttataatttgctgcataacacctgcggcacctgctcgcgccgggtccagcaacactttatcgaagccgtttttcgcccacggctgctttgtgacatcttcttcaagattttcgtgataaaacgtcacattctgtaagcagttaagacgcgcattctgctggcctttttccaccagcgccggaacaccttctacacccaccacactggcagcttgtgtcgccaatggtagtgtaaagttgcccataccgcagaacagatccagtacgcgatcttcaggttccacctccagccattccaacgcacgcgctaccattttttggttcacacccgcattaacctgaataaaatcgcgcgggctaaaagttaagcgcaacccgtttgagtcataccagggcatctcaccagagacggtttcgagtatctcactatcgggggcgagatacagatccaggccttcagaatgcgaaaagcgttccagtttttcgcgatctgccgaacttagcggtgcggtatggcgcaaaatcatcagcgtgccgctggttgcctgtaccagttcaacatgaccaagatggcgcatagcttgtaagctgcccaggcatgccctgactttgggcagcaatgcttcaagttggggcactaaaatgggacattgtttaacgtcgacaatgtcactggagcccgctttgcgaaaccccatctgaagttgctgtgttttcggtaagtagttcagacttaaacgcgcgcgacggcgatagccccagggaacatcggcgatcacttcagagacttcgtgtttcattaatcgggcgagtgccgcacttttgcttcgctgctgtaaatccacgctggcgtgttgttgctgacagccgccgcatacgccaaaatgaggacagcgtggcgtttcgcgttccgggctatcgcttaaccggcgtacgactttagcgcgggcatactgttttttatcctcagtaacagtaacttccgcgttttcctgcggcaataatccggggataaatagcgttttgccgttatgtcgcgccacgccctgaccaaaagagtcgaggtcgttgactgaaacggttatgatctgacgcgtcgtcgtgcgtcgttttgcagagtagaattgcgccattggcgagactttctcaatttaacagtgtgaccttaattgtcccataacggaactccatgaccaactacagcctgcgcgcacgcatgatgattctgatcctggcaccgaccgtccttattggtttattgctgagtatctttttcgtcgtgcatcgctataacgacttgcagcgtcaactggaagatgccggtgccagcattattgagccgcttgcagtttctactgaatatggcatgagcctgcaaaatcgcgaatctatcggtcagttaataagcgtactgcatcgtcgccattccgatattgttcgcgcgatttcggtttatgatgaaaataaccgactctttgtcacctccaattttcatcttgatccctcatcaatgcagctcggcagcaacgtgccgtttcctcgccagctcactgtcactcgtgacggcgatattatgatcctccgcacgccgattatttctgagagttactcccccgacgaatcgcccagtagcgatgccaaaaatagtcaaaatatgttgggatatattgcgcttgagctggatcttaaatcggttcgcttgcagcaatataaagagatctttatttccagcgtgatgatgctgttttgtatcggtattgcgcttatttttggctggcgcttaatgcgcgatgtaaccggtccgattcgcaacatggtgaatactgtcgaccgcatccgtcgcgggcaactcgacagccgagtggaaggatttatgctcggcgagctggatatgctgaaaaacggtatcaactcgatggcaatgtcgctggctgcttatcacgaagagatgcagcacaatatcgaccaggcgacgtccgatctgcgtgaaacgctggagcagatggaaattcagaacgttgagttggatctggcgaaaaagcgcgccnnnnnnncggcgcgtattaaatccgagtttctggcaaatatgtcacacgagctgcgtacaccactgaatggtgttattggttttacccgcctgacgctgaaaacagaattaacaccaacgcagcgcgatcacctgaatacgattgaacgttcggcaaatnnnntgctggcaattattaatgatgttctcgacttctcgaaactggaagcaggtaagctgattctggaaagtattccattcccactacgcagcacgctggatgaagtcgttactctgctggcacattcttctcacgataaagggttggaactgacgctcaatattaaaagcgacgtgcctgataacgtgatcggcgacccactgcgattacagcaaatcatcactaacctggtggggaatgcaattaaattcaccgagaatggcaacattgatattctggtagaaaaacgtgcgctgagtaataccaaagtgcagattgaagtgcagattcgggataccggcattggtattcctgaacgcgatcaatcgcgcttattccaggccttccgacaggctgatgccagtatttcccgccgtcatggtggcaccgggctggggctggtgattacacaaaaactggttaatgaaatgggcggcgatatttcgttccatagccagccgaatcgcggttcaactttctggttccacattaatctcgatctgaacccgaacattattattgaagggccatccacccagtgcctcgccggtaaacgcctggcctatgtcgaaccaaactccgcagcagcgcaatgcacgctggatattttaagtgaaacgccgctggaagtggtttatagcccaacgttctccgcgctgcctcccgcgcattacgacatgatgttgttaggcatcgcggtgaccttccgcgagccgctaacaatgcaacatgagcgattagcgaaagcggtatcgatgaccgatttcctgatgctggcacttccttgccatgcacaagtcaatgctgaaaaactcaagcaagatggtatcggcgcgtgtctgctgaaaccattaacacntacgcgcctgttgcctgccctgacggaattttgtcatcacaaacaaaacacgcttttgcctgtaaccgatgaaagtaagctggcaatgacagtcatggcggttgatgacaaccccgctaacctgaaacttatcggcgcattgctggaagatatggtgcaacatgtggaactttgcgatagcgggcatcaggcggttgaacgggcgaaacagatgccgttcgatttgatcttaatggatattcaaatgcctgacatggatggcattcgggcctgcgagctcatccaccagctcccccatcagcaacaaacgccggttatcgcggtaacggcgcatgcaatggccgggcaaaaagagaagctgcttggcgcagggatgagcgattatctggcgaaaccgattgaagaagagcgattgcataatttgttgttgcgctacaagcctggcagcggtatttcgtctcgcgtcgtgacgcccgaagtcaacgaaattgtggtgaacccgaatgcgaccctcgactggcaactggcactacgccaggcagcaggaaaaaccgatttagcgcgcgatatgctgcaaatgttactcgatttcctgcctgaagttcgcaacaaagttgaggaacagctggttggagaaaacccggaaggcctggttgatttgattcataaactgcatggcagttgcggctatagcggtgtgccgcgtatgaagaatctctgccaacttatcgaacaacagctacgtagcggtactaaagaagaagatttggaaccggagctgctggaactgttggacgagatggataatgtcgcgcgcgaagccagcaaaattctcgggtaacggacgtcttgtcgagtagcaatcggctttttatgacgctgttttcagattggtgacaaagtgcctgtgtttatgccggatgcggcgttaacgccttatccggcctacaaaaccaattaaattcaataaattaaaaagcatgtaggcctgataagcgtagcgcatcaggcaattttgtgtttggcatcagtctcaaaccggctccagatagagccggttttggttttttgtcttaacgcaccatgcacgggcgcttgttatcgaacgtccagccaggaatcagatactgcattcccatcgcatcgtcacgcgcgccaagcccgtgtttctgatacagctcatgggctttcatcacttgatccatatcgatttctacacccagccccggtttttctggcacctgtaccagcccgcctttgatctcaaacggttctttggtcaggcgctgattaccttcctgccagatccagtgcgtatcaatagcagtaattttacccggtgcagcggcggcaacatgggtaaacatcgccagggaaatatcgaagtggttgttagagtgtgaaccccaggtcaggccaaattcatggcacatttgcgccacacgtaccgaaccttgcattgtccagaaatgcggatccgccagcgggatatcaacggattgtaacgagagcgtatggcccatctgccgccagtcggtggcgatcatattggttgcagtcggcaggccagtcgcgcgacggaactctgccatcacttcacgcccggagaaaccttgctccgcaccacacggatnttctgcataagccagcgaacctttcaggtatttgccgattttaatcgcttcgttcagcgaccaggcaccgttaggatcgagcgtaatacgcgcctgcgggaagcgttgcgccagtgccacaatagactcggcctcttcttccccggccagtacaccgcctttcagtttgaaatcgttgaagccatatttttcatacgccgcttccgccaggcgcaccaccgcatccggcgtcatcgcttcttcatgacgcaggcgataccagtcgcatgagtcatccggctggctttgatacggcagaggtgtggctttgcgattaccgacgaagaacagataaccgagcatttcgacttcgctacgctgttgaccatcgcccagcagggatgccacgttaacccccagatgctgccccagcagatccagcattgccgcttctatcccggtaactacatgaatagtggtacgcaaatcaaatgtctgcaaaccgcgcccgccggcatcacgatcggcaaaagtattacgcaccagcgtcagaacgtttttgtattcacccagcgttttacccactaccagcggaattgcatcttccagcgttttacggattttctcgccgccgggaatttcccctacgccagtgtgaccagaattatctttgataatcacaatattacgcgtgaagaacggtgcgtgtgcaccactcagattcatcagcatactgtcatggcccgccaccgggatgacctgcatttcagtaacaacaggcgtcgtaaattgagaactcatatttatgtcctttttcagaatcaatgacggccgaaaacgggacgtttacggtcaaaggtccagccggggatcaggtactgcatcgggcctgcgtcgttacgcgcaccgccaggcagacgtttataggcctcatgtgccttttgtacctgttcccagtccagttccacgcccagaccgggcgcatcaggaacggcaatttttccgtttttaatctccagcggattttgggtcaggcgacaatcgccctcctgccaaatccagtgggtatcgatagcggtaggattacccggtgccgccgcgcccacatgggtaaacatcgccagagagatatcgaaatggttgttggaatggcagccccaggtcagcccccagtcgtcgcaaagctgcgccactcggactgcaccggaaagcgtccagaagtgcggatcggcaagtggaatatctaccgcattgagcatcaccgcatgacccatttcgcgccagttggtggcgatcatattagtcgcgacgggcaagccggtcgcccgccgaaactccgccatcacttcacgtccggagaagccctgttctgcgccgcatggatcttcggcataggtaagaacatcattcagccctttgcacagagaaatggcttcatcaagcagccatgcaccgttgggatcaacggtaatccgcgtatccgggaagcgtttcttcaatgcacgaacagtgtcgatttcttgctcgccaggtaacacgccgcccttaagtttgaaatctttaaagccgtagcgatcctgtgaggcttccgccagacgcacaacggcttcgctgttcatcgctttctgatggcgcaactgataccactcatggttgcccggcgtattttccagataaggaagatcggttttggtccgatcaccgatataaaacagataaccgaggacggtaatagcatcgcgttgcttgcctggccctaacagttcgcagaccggaacattcagcgccttacctagcaggtcaagcaaggcggcttccagcgccgccacggcgttaacgcgcaattcaaaggtccagncccctttaccgaaggtatcaaaatcggctgcttgattacctttatgcacctgctgaaccactttattcaggcgcgcaacttcctggcccagcaccatcggaatagcatcgaccaatgtctgataaatcacctctccgcctggcgcttcaccaatgccggtatgcccggcgttatcggtgagtaccacaatattgcgagtgaaatatgcgttatgcgccccaccaatattaagcaacatgctgtcgtacccggcgaccggaatgactttcatatcagtaataacaggactggattgtgtcgtcatcttattgccccgcgacaggtttcagctcgatacgcttgatatcgcccaccagcaccaggtagctcagtaccgcgattaaggcatgaacaccaacataaatcagcgccccattaaacgagccagtcgtgccaacgatataaccaattgcgattggcgtgacgatgccagaaatgttaccgaacatgttgaacaggccaccggaaagaccgctgatctcttttggcgcggtatctgccattactgcccaacccagcgccccaatgcccttaccgaagaaggccagcgccataaagccgatgatcatccactcaacgttgacgtagttgcagaacaccatcaccatcgacagcaacatgcccattacgatcggtgttttacgcgcaatgttcagcgatcccgtgcggcgcatcagccagtcggaaataatcccacccagcacatcaccgataaaaccacaaaccgccggaacggaagccacaaagcccgctttcagaatcgacatcccacgcgcctgcaccagataaaccggaaaccaggtaatgaaaaagtaagtcagggcgttgatacagtactgaccgatataaacgccgatcatcatccgtgacccgagcagttgtttgatctgcccccacttcacgctgaacggcactttaactttggtgttttgctgatccatattgatcagcgcgccacccgcggcgatgtactccagctctttctgatttacccccggatgttgatttggctcgtggatgactttcaaccagataaagctgatggcaatgcccagaccgcccataaagaagaagacgtgtgaccagcccacttcatgcgtcagccagcccataatcggcgcgaagatcaccgttgcgaagtattgagcggagttaaaaatcgacaccgccgttcccctttcctgcgccggaaaccaggccgcaacaatgcgactgttgccggggaaagatggcgcttcagcaagcccgaccaggaagcgcagagtaaacagggcaacgataatgccgaatccactaaagatatcgacgaagccttgcagcaaggtaaacatcgaccagataaagatcgaccagaagtagacgcgttttgaaccaaaacgatccagcaaccaaccaccagggatctgcccgataacataagcccatgagaaggcagagaacacatagcccattcccacgggatcaaggccgatatctttggccatttccgaaccggcaatagaaagcgtagcgcggtcgccgtagttgaaggatgtgacgataaacaacatcaccactatccagtaacgagcattcgtgcgtttttccacactgctcgcagcctgacttaaagaactcattgttgcactcctgaaaattcgcgttagccacgctcactctggactgcgacatcgccaggaaatcagaggtgacgtagggtgttttttgccgtttttataggtcgttcgccgaatacggcgcgtgtttatatctggcaatagcagtataaaaagcgcgccatagcggctcaccgtgcaacaacacaacattaatgcgttcaatgaggcccgattttggcattagccctggacggtggaatccacttcacggaaatgaaaacaagaacaagaaaggaagggttaaaacgaagaaataaagaagagtatgaaatggatcgcttgactccaggcaaacgccagtaaaaatccgcgctatgaagcagtttttactggcatttgcctgaaaagattcgattcagcaccgctaaaacgacatttaccgctcgctgaacatatcaggacaacagcgtgccccactgttcgacccacggatttgattccgtttccggttccgggttctcactggcgtcaatcaacagcatttcgccaacccgctgagcgctctgttcctgcagcaaggcatcgaactgtttgccgccattgcagaaattcacataactactgtcgccgagcgcaatcacgccataacgcagattcggctggaagcccagactatctttgattccctgaaagagcggcacaatgctatcaggaaggtcgccctgcccggtcgtggacgtaaccaccagaacatacttatcntgatagggcagccagtcgcttaattcaggatcttcaaataccgttgctttgtggccctgtgcggtcagaattgcttctgcttcttccgccactaacagcgaatttccgtacatggtgccgacaaaaataccaatttccgccataccgttttctccctggattaggaacttatctctccatcctgacccgatggcgcactgaactcaaccctttcattttcaggaagcagaccgcgccagccaaattgtgataacgcctgcatccaggtgtcgtccaggcccgcgtgaatagtcagcggctcaccagtaaaaggatgcgtcaatgacaactgactggcatgcagcattaaccgctgaagaccaaaatgctcagcaccgctgcgattctggcgtaaatcgccatgtttgctatcgccaataatcggatgacgcaaatgggcaagatgtcggcgaagctgatgtttgcgtccggttttcggctccagttccaccaggccgtagcgcgtggtcgggtaacgtccggtcgctaccggcatttctacggtcgccagaccgcgataatgcgtcactgctggctgcgggcctttatcttcgcgggcaaatttatcagcgattttgtccagttcttccaccagtggataatccagcaccgcttcttccatcaaccagccgcgcacaatcgcatggtaacgtttctggatttggtgctgttcaaactgttgtgccagcagccgtccggcctcgctggataatcccatcaacaacacaccagaagtgggtcggtccagacgatgagcagtaaaaacatgctggcctatctggtcacgcacggtttgcatgaccactactttctcgtcgcgatccagccagctacggtgaaccagccagccggagggtttatttaccgcaaccagccattcatcctgatagagtatttccagcattagctcgcatcatccgcaaaaagagcatccagtttttccaactcagccagaataagcgcgcgttgcggatggtccgtcgccagcgccatttcataatagggtgcaacggcaaaagcgcccggtaacggctggttgttatttaacaaatcgtgcattcgcgggatcagcacccactgcaaccactccagtggttccatggtgtccataaagaacggttgggtactattaaattgatgcggctggggttcatcgtttcgccagtgctgatgttcacgcagtaacgcttcaagcgcctgcaactggagacgaacgcggtcatgagtggtcataaagcaacctcaataagaaaaactgccgcgaaggatagcaggaataaaaaaagggagcactgtattcacagtgctcccggttcgtttcgcagcattccagctacttttgttgctccctgctcatccttgacaacttttcctctggccatgcggccaatcgttcatcctgaactattgcttcctgctcacaccaccccgatgtgatacttcatcctgaagtgtcccaggccttcctgacccaccgaatcatcctgaccggttctcattctccatcctggaggtgtcctttaacgcgtcctgcgtcatcctcttcgcttcatccagaagcctttccctgaaacaccatcctggtgtgtccttcagaagtgtcatcatcctgatgttcacttcgttgtctgactccctgtcgacgaagatagaatcgtctttttcgcgaactcttacaaggcgcttacagacaatgccttaaggaaaatttcatatgaaagttaggaattaacaagcaacnnnntgtttttaaatgaaaataacgattcttatctttttaagtattcgcttatttcctggcgatctcctacagagtctgtaagagatctctcacaaccagatggggtatttggattacagaagaggcttaagttgattaaggaattccgcaagatttggggctaaatgcgtccgtttacgtgttcccagcgtctctttacacacttcaccggagagattacacaccgagatgacctctaactcttcttccagcgtcgcgataaatagcgtgggtggcagttttagccttttctgagtcaccagatgaccaatcagattttcctgcacccgacggaagtcgtcttcactccaggtttgcagcaatgtcagtttgatatcgccaaactgcgcgtgcatatccccggcaaactgagtcgtataaaaggtatgaattgtgggttgtatcacaatatcaaaagcgcgttcaaccgcgtttacattttgttccccggtaaacggctggggttgccagtatacggcatcttcagtagttgaaataatgcacggtgaaggaacgccgtacagttcctcacttaacggccagcttttatgctcttcatgccacgcatcgcagtagcgtgcagtaaaatctttcagggcttgtgcggtcaaatcgtccactaatttctctcttcacttaaaccagatacacttgtcgtttagtttatctggtttatgacggtgaaacatgtcttcttatgcaaaccatcaggcacttgcgggcctgactcttggaaaatcaaccgattaccgggagacctatgacgccagcctactgcaaggcgttccacgcagcctgaatcgcgacccgctgggtctgaaagcggataacctgccttttcaaggtacggatatctggacgctgtatgaactttcctggctgaatgcgaaaggtttgccgcaggtcgctgtcggtcatgttgaacttgattacaccagcgtaaatctgattgagtcgaagagttttaagctctatctcaacagttttaaccagacgcgttttaataactgggatgaggtgcgccagacgctggagcgcgacttaagcacttgcgctcagggtgaggttagcgtggcgttatatcgtcttgatgaactggaaggccagccgataggtcatttcaatggcacttgcattgatgaccaggatatcactatcgataactatgaattcactactgactatctggagaatgccaccagtggtgaaaaagtagtggaaganacgctcgtcagccacctgctgaaatcaaactgcctgatcacccatcaaccagattggggttcgatccaaattcagtatcgtggacgccaaattgacagagaaaaactgctgcgttacctggtctcattccgtcatcacaacgagttccacgaacagtgcgtggaacgcatctttaatgacctgttacgcttctgccagccagagaaattgagcgtttacgcacgttatacccgtcgtggcggtctggacattaacccgtggcgcagtaatagcgattttgtcccatcgaccacaagactggttcggcaataaattttttctcaattttgcgtgctggattcacgcagaaggttgtgaaaggtcatcaggcagggctattgtaatcaaagggaatgacgatattcgtcccataaggagtttttcttgattacacatattagcccgcttggctccatggatatgttgtcgcagctggaagtggatatgcttaaacgcaccgccagcagcgacctctatcaactgtttcgcaactgttcacttgccgtactgaactccggtagtttgaccgataacagcaaagaattgctgtctcgttttgaaaatttcgatattaacgtcttgcgccgtgaacgcggcgtaaagctggaactgattaatcccccggaagaggcttttgtcgatgggcgaattattcgcgctttgcaggccaacttgttcgcggttctgcgagacattctcttcgtttacgggcaaatccataataccgttcgttttcccaacctgaatctcgacaactccgtccacatcactaacctggtcttttccatcttgcgtaacgctcgcgcactgcatgtgggtgaagcgccaaatatggtggtctgctggggcggtcactcaattaacgaaaatgagtatttgtatgcccgtcgcgtcggaaaccagctgggcctgcgtgagctgaatatctgcaccggctgtggtccgggagcgatggaagcgccgatgaaaggtgctgcggtcggacacgcgcagcagcgttacaaagacagtcgttttattggtatgacagagccgtcgattatcgccgctgaaccgcctaacccgctggtcaacgaattgatcatcatgccggatatcgaaaaacgtctggaagcgtttgtccgtatcgctcacggcatcattatcttccctggcggtgtgggtacggcagaagagttgctgtatttgctgggaattttaatgaacccggccaacaaagatcaggttttaccattgatcctcaccggcccgaaagagagcgccgactacttccgcgtactggacgagtttgtcgtacatacgctgggcgaaaacgcgcgccgccattaccgcataatcattgatgacgccgctgaagtcgcccgtcagatgaaaaaatcgatgccgctggtgaaagaaaatcgccgtgatacaggcgatgcctacagctttaactggtcaatgcgcattgcgccagatttgcaaatgccatttgagccgtctcacgagaatatggctaatctgaagctttacccggatcaacctgttgaagtgctggctgccgatctgcgccgtgcgttctccggtattgtggcgggtaacgtaaaagaagtcggtattcgcgccattgaagagtttggtccttacaaaatcaacggcgataaagagattatgcgtcgtatggacgacctgctacagggttttgttgcccagcatcgtatgaagttgccaggctcagcctacatcccttgctacgaaatctgcacgtaatctcccctcccccggtgacgtttgttgccgggttttctcgtttttggtcacttactcatcaactcatttcatttgttatatgaatgtttcttaccaccctcacgcgacaaatatcatcacagttaatatgtcatacaatttatattgcaacgcaaacgtttccctattttcataaaccgtattttatcgctatgaaaaagaaattatcgccatgattaactaaaagtattgattttttcagttcaacctacatatattgcgcgccccggaagaagtcagatgtcgtttaatgggcaaatattgcccttaaattctcttttacttttgatttacagagtaaagcgttgggataatctatcttccaagnagattattgtatttgggatcaagatcactgatagatacataacttgtgtgtatctttccgccctcaaattattacggcggtaaatgattaagccatcgccgatagacagatttcatttttacggtcaggcaccttcccgggctgaactggctaaaagctgaattatttgcattcctccaggagaaatagatggaaacgactcaaaccagcacgattgcgtcgaaagactctcgtagtgcctggcgcaagacagacaccatgtggatgctgggcctttacggcacggcaatcggcgcgggcgtgctgttcctgccaatcaacgccggtgttggcggtatgatcccgctgatcatcatggctatccttgcgttcccgatgacgttttttgctcaccgcggcctgactcgcttcgtactgtctggtaaaaacccgggcgaagacattaccgaggttgtagaagaacactttggtattggcgcaggtaaactgattaccctgctctacttcttcgctatctacccgatcctgctggtttatagcgtggcaatcaccaatacagttgaaagcttcatgtctcaccagctgggtatgacaccaccgccgcgtgcgattctgtcgctgatcctgatcgtgggtatgatgaccatcgttcgctttggtgaacagatgatcgttaaagcgatgagtattctggtattcccgtttgttggcgtactgatgctgctggctctgtacctgatcccgcagtggaacggcgcagcactggaaacgctgtctctggacactgcatctgcaaccggaaacggtctgtggatgaccctgtggctggcaattccggtaatggtgttctcgttcaaccactctccgatcatctcttctttcgccgttgcgaagcgtgaagagtacggcgatatggcagaacagaaatgctcgaagatcctggcattcgcacacatcatgatggtgctgaccgtaatgttcttcgtcttcagctgcgtactgagcctgactccggcagacctggctgcggctaaagagcagaacatctcgattctgtcttacctggctaaccactttaacgcaccggttatcgcgtggatggctccgattatcgcgattatcgctatcaccaaatccttcctcggccactacctgggcgcacgtgaaggcttcaacggtatggtgattaaatctctgcgtggtaaaggtaagtctatcgaaatcaacaagctgaaccgtatcactgcgctgttcatgctggtaacgacctggattgttgccaccctgaacccgagcatcctgggtatgattgaaaccctgggcnnnncaatcatcgcgatgatcctgttcctgatgccgatgtacgcaattcagaaagtaccggcaatgcgtaagtacagcggtcacatcagcaacgtattcgttgtcgtgatgggtctgattgcaatctccgcaatcttctactctctgttcagctaagtcctttcgcgccgctttcgggcggcgcttcctccgttttaacgcgatgtatttcctatgattagcgtattcgatattttcaaaatcggcattggcccttccagttctcataccgttggaccaatgaaagcgggtaaacaatttaccgacgatctgattgcccgtaacctgcttaaagacgtgacccgcgtggtggttgacgtgtacggctcgctctctctgactggtaaaggccaccacactgatatcgccattattatgggcctggcgggtaacctgccggataccgtggatatcgattccatccctggttttattcaggatgtgaatactcatggtcgcctgatgctggcaaacggtcagcatgaagtggagttcccggttgatcagtgcatgaacttccatgccgacaacctttctctgcatgaaaacggtatgcgcattaccgcgctggcgggtgataaagtcgtttacagtcagacttactactctattggcggtggctttatcgttgatgaagagcattttggccagcaggatagcgcaccggttgaagttccttatccgtacagttcagcagccgatctgcaaaaacattgtcaggaaaccgggctgtcactctctggcctgatgatgaaaaacgagctggcgctgcacagcaaagaagagctggaacagcacctggcgaacgtctgggaagtgatgtgtggcggtattgagcgcggtatttccaccgaaggtgtgttacctggcaaactgcgtgttccacgccgtgctgcggcactacgccggatgctggtcagccaggataaaaccaccactgacccgatggcggttgttgactggatcaacatgtttgcactggcagtgaacgaagagaacgctgctggcggtcgcgtggtgactgcgccgactaacggtgcgtgcgggattatcccggcagtgctggcgtactacgataagtttatccgcgaagtgaacgctaactcactggctcgttacctgctggtagccagcgccattggttctctttataagatgaacgcgtcgatttctggtgccgaagtgggttgccagggtgaagttggtgtggcgtgctcaatggcggcggctggtctggcagaactgttaggtgcaagcccggcgcaggtgtgcatcgcggcggaaatcgccatggagcacaacctcggtctgacgtgtgacccggtcgccggacaggtacaggtgccatgcatcgagcgtaacgccattgcggcagtaaaagcggtgaacgccgcacgtatggcgctgcgccgtaccagcgagccgcgcgtctgcctcgataaagttatcgaaaccatgtacgaaacaggtaaagatatgaacgccaagtaccgcgaaacctctcgcggcggcctggcaatgaagatcgttgcctgcgattaatcgctctccagaggcctcgttttgcgaggcctcttcccgatttctcatccagccatagcctgttccagtatcgaatgttacccttatcgcctgatctttaagggggttatcgtggctgttcatttgcttattgtcgatgcactgaatcttattcgtcgcattcatgccgttcaggggtcgccctgtgtcgaaacctgccagcatgcgctcgatcagctcattatgcacagccagccaacccacgcggtcgccgtttttgacgatgaaaaccgcagtagcggctggcgtcatcagcgtttaccagattacaaagcgggtcgaccgccaatgccggaagagttgcacgacgagatgcctgcattacgcgccgcctttgagcaacgcggcgtcccgtgctggtcaaccagcggcaacgaagccgatgacttagccgccacgctggcggtcaaagtgacacaggccgggcatcaggcaacgattgtttcgacagataaaggctactgtcagttactttcaccgacattacgtattcgtgattacttccagaaacgttggctggatgcgccatttatcgataaagaatttggcgttcaaccgcagcagttgcccgattactggggacttgcggggatcagcagttcaaaggtaccgggtgttgcgggaatcggaccaaaaagcgccacgcagctgctggtcgagtttcagagtctggaagggatatatgagaatctggatgcggttgccgaaaagtggcgcaaaaaattagaaacccataaagagatggcgtttctgtgccgcgatattgcccgcttacaaaccgatttgcatatcgacggcaatttacagcaattgcggttggtacggtaacggngtgccggatacgccgcaaacgtcgcatccggcattatcacatcagcgcatttaccaggcggtatggtaaagntctacaatatcctcaagcgttgcttcacgcgggttgccaccggtacaaacatcatccagtgccgcctgcgccagtgccggaatgtcttccttgcgtacaccaacatcacgcaaatgtggcggaataccgacatcacggttgagagcaaacaccgcttcaacagcggcattacgcgcctcttccaggctcataccttccactttcacgcccataacgnnnnngatatcgcggtacttctcaccggtaaagtcagcgttataacgcatgacatgcggtaacaggatggcgtttgcaacaccgtgtggagtgttataaaacgcgcccagtggatgcgccataccatgcaccaaccctaaccccacattcgagaagcccatacccgcaacatactgcccgagcgccatttcttctccggcatccttatcaccagcaaccgatcctcgcagcgccccagcaatgatttcaatcgctttaatgtgcagtgcatcggttagcgcccacgcgccacgggtaatatacccctcaatagcatgagtgagcgcatcgacacccgtcncagctttcagcgctggaggcataccatccatcatgtcagcgtcaataaacgccacctgcgggatatcatgcggatcaacgcaaacaaacttgcgccgtttttcttcgtcagtgatcacgtagttaatggtcacttctgccgcagtgcctgctgtggtggggattgccagaatcggtacactgggtttattggtcggggaaagtccttccaggctacgcacatcggcaaactccgggttgttgctgataatgccaatcgctttacaagtatcctgtggagaaccaccaccaatagcgatcaggtaatccgcgccgctattctggaatacaccgagcccttctttgacgacagtaattgttgggttgggcactacgccgtcgtaaatcgcccatgccagccctgcagcatccatcttatcggtcactttcgccaccacgccgcattgcaccagcgttttatcggtgacgatcagcgccttctgataaccacggcgtttcacctcatcggttaaagccccaacagcaccccgaccaaaccatgccgtttcgttcagaatcattctgttagccatcatccttctccttgttgctttacgaaattactcttcaatccgtaacccataggttttgaatttctccagcactacggcaatctcttcatcgctcagcactggcaccgggtccgtaatcgccagggtcgtcaggtaaagttgcgccagcacttcaacttcatgcgccagccataacgctttttccagattcacctcacaagcgataagcccatgatgttgtaacaaagttgccttacgatttttgagagccagcgcaacatgttcagaaagttcgcgtgttccaaaggtcgcataaggcgcgcaaggaatagaattaccgccagccgccgcaatcatgtagtgaatagcggggatcggtcggttaagaatggaaactgctgtgcaatgaacggcatgattgtgaacaaccgcgttggcatccggtctgctttgataggccgccatatggaaacgccactcgcttgaggggagctttccttcctcatgtttaccgttgccatcaataaagacaatatgcgactccgtcagtttttcatatggaatgcctgtaggcgtaatcagcatcccatcctgataacgtacactgacgttccccgctgtcccctggttcagtcccaggcgggtcatttccaggcaagtgtcaataatctgacgagcaagtttatttcgttccattagctacctctctctgattcaaaacagggcaataatgttgttcctttcacactattgaattagccgtttaattacccaccatcttcttcctgattaacaagaaagaaattcacaagcttatattttgtgacctagttcaactaatcacagtaaataactgcaagttctctttttataaccccattaaaaatgaccgctcttaaaaatatttatcaaaacggtcatttttctattcacccaagccaggaatgcccgttttcggcataaacaattaatacggtcatctggtttgtgttttttatgatttattttctgaaacgggcatgaaatttcgattattaaagtgatggtagtcacataaagtcaccttccagctaataagtgtgaccgccgtcatattacagagcgttttttatttgaaaatgaatccatgagttcatttcagacaggcaaatattcactgatatgaagcccgaactcgctggttttgcacttttgaaaacataaccgattacgtgcttaagcttctgaacctaagaggatgctatgggaaacacatcaatacaaacgcagagttaccgtgcggtagataaagatgcagggcaaagcagaagttacattattccattcgcgctgctgtgctcactgttttttctttgggcggtagccaataaccttaacgacattttattacctcaattccagcaggcttttacactgacaaatttccaggctggcctgatccaatcggccttttactttggttatttcattatcccaattcctgctgggatattgatgaaaaaactcagttataaagcaggaattattaccggattatttttatatgccttgggtgctgcattattntggcccgccgcagaaataatgaactacaccttatttttagttggcctatttattattgcagccggattaggttgtctggaaactgccgcaaacccttttgttacggtattagggccggaaagcagtggtcacttccgcttaaatcttncgcaaacatttaactcatttggcgcaattatcgcggttgtctttgggcaaagtcttattttgtctaacgtgccacatcaatcgcaagacgttctcgataaaatgtctccagagcaattgagtgcgtataaacacagcctggtattatcggtacagacaccttatatgatcatcgtggctatcgtgttactggtcgccctgctgatcatgctgacgaaattcccggcattgcagagtgataatcacagtgacgccaaacaaggatcgttctccgcatcgctttctcgcctggcgcgtattcgccactggcgctgggcagtattagcgcaattctgctacgttggcgcacaaacggcctgctggagctatttgattcgctacgctgtagaagaaattccaggcatgactgcaggctttgccgctaactatttaaccggaaccatggtgtgcttctttattggtcgtttcaccggtacctggctcatcagtcgcttcgcaccacacaaagtcctggccgcctacgcattaatcgctatggcactgtgcctgatctcagccttcgctggcagtcatgtgggcttaatagccctgactttatgcagcgcctttatgtcgattcagtacccaacaatcttctcgctgggcattaagaatctcggccaggacaccaaatacggttcgtccttcatcgttatgaccatcattggcggcggtattgtcactccggtcatgggttttgtcagtgacgcggcgggcaacatccccactgctgaactgatccccgcactctgcttcgcggtcatctttatctttgcccgtttccgttctcaaacggcaactaactgaacatattttccgaataaagtgaggaatctgtaatgaacaaaatcagcttaccgaaaattggtatccgcccggttattgacggtcgtcgcatgggtgttcgtgagtcgcttgaagaacaaacaatgaatatggcgaaagctacggccgcactgctgaccgagaaactgcgccatgcctgcggagctgccgtcgagtgtgtcatttccgatacctgtatcgcgggtatggctgaagccgctgcttgcgaagaaaaattcagcagccagaatgtaggcctcaccattacggtaacgccttgctggtgctatggcagtgaaaccatcgacatggatccaacccgcccgaaagccatttggggctttaacggcactgaacgtcccggcgctgtttacctggcagcggctctggcagctcacagccagaaaggcatcccggcattctccatttacggtcatgacgttcaggatgccgatgacacatcgattcctgccgatgttgaagaaaaactgctgcgctttgcccgcgccggtttggccgtcgccagcatgaaaggtaaaagctatctgtcgctgggcggcgtttcgatgggtatcgccggttctattgttgatcacaacttctttgaatcctggctgggaatgaaagtccaggcggtggatatgaccgaactgcgtcgccgtatcgatcagaagatttacgacgaagccgaactggaaatggcactggcctgggctgataaaaacttccgctatggcgaagatgaaaataacaaacagtatcaacgcaatgccgagcaaagccgcgcagttctgcgcgaaagtttactgatggcgatgtgtatccgcgacatgatgcaaggcaacagcaaactggccgatattggtcgcgtggaagaatcacttggctacaacgccatcgctgcgggcttccaggggcaacgtcactggaccgatcaatatcccaatggtgacaccgccgaagcgatcctcaacagttcatttgactggaatggcgtgcgcgaaccctttgtcgtggcgaccgaaaacgacagtcttaacggcgtggcaatgctaatgggtcaccagctcaccggcaccgctcaggtatttgccgatgtgcgtacctactggtcaccagaagcaattgagcgtgtaacggggcataaactggatggactggcagaacacggcatcatccatttgatcaactccggttctgctgcgctggacggttcctgtaaacaacgcgacagcgaaggtaacccgacgatgaagccgcactgggaaatctctcagcaagaggctgacgcttgcctcgccgctaccgaatggtgcccggcgatccacgaatacttccgtggcggcggttactcttcccgcttccttaccgaaggcggcgtcccgttcaccatgactcgtgtcaacatcatcaaaggcctgggaccggtactgcaaatcgcggaaggctggagcgtggaattgccgaaggatgtgcatgacatcctcaacaaacgcaccaactcaacctggccaaccacntggtttgcaccgcgcctcaccggtaaagggccgtttacggatgtgtactcggtaatggcgaactggggcgctaaccatggggttctgaccatcggccacgttggcgcagactttatcactctcgcctccatgctgcgtatcccggtatgtatgcacaacgttgaagagaccaaagtgtatcgtccttctgcctgggctgcgcacggcatggatattgaaggccaggattaccgcgcttgccagaactacggtccgttgtacaagcgttaatacattactccctgatgtgatgcccggtcgctccggctgccgggcctgaacaagcaagagtggttagccggataagcaatgttatccggctatattgcaggagcgatcatgaaacaagaagttatcctggtactcgactgtggcgcgaccaatgtcagggccatcgcggttaatcggcagggaaaaattgttgcccgcgcctcaacgcctaatgccagcgatatcgcgatggaaaacaacacctggcaccagtggtctttagacgccattttgcaacgctttgctgattgctgtcggcaaatcaatagtgaactgactgaatgccacatccgcggtatcgccgtcaccacctttggtgtggatggcgctctggtagataagcaaggcaatctgctctatccgatcattagctggaaatgtccgcgaacagcagcggttatggacaatattgaacggttaatctccgcacagcggttgcaggctatttctggcgtcggagcctttagtttcaatacgttatataagttggtgtggttgaaagaaaatcatccacaactgctggaacgcgcgcacgcctggctctttatttcgtcgctgattaaccaccgtttaaccggcgaattcactactgatatcacgatggccggaaccagccagatgctggatatccagcaacgcgatttcagtccgcaaattttacaagccaccggtattccacgccgactcttccctcgtctggtggaagcgggtgaacagattggtacgctacagaacagcgccgcagcaatgctcggcttacccgttggcataccggtgatttccgcaggtcacgatacccagttcgccctttttggcgctggtgctgaacaaaatgaacccgtgctctcttccggtacatgggaaattttaatggttcgcagcgcccaggttgatacttcgctgttaagtcagtacgccggttccacctgcgaactggatagccaggcagggttgtataacccaggtatgcaatggctggcatccggtgtgctggaatgggtgagaaaactgttctggacggctgaaacaccctggcaaatgttgattgaagaggctcgtctgatcgcgcctggcgcggatggcgtgaaaatgcagtgtgatttattgtcgtgtcagaacgctggctggcaaggagtgacgcttaataccacgcgggggcatttctatcgcgcggcgctggaagggttaactgcgcaattacagcgcaatctacagatgctggaaaaaatcgggcactttaaggcctctgaattattgttagtcggtggaggaagtcgcaacacattgtggaatcagattaaagccaatatgcttgatattccgttaaaagttctcgacgacgccgaaacgaccgtcgcaggagctgcgctgttcggttggtatggcgtaggggaatttaacagcccggaagaagcccgtgcacagattcattatcagtaccgttatttctacccgcaaactgaacctgaatttatagaggaagtgtgaaatgctgaaaacaatttcgccgttaatttctcccgaactattgaaagtgctggcagagatgggacatggagatgaaattattttttccgatgctcactttcccgcccattcgatgggaccgcaggtgatccgcgctgatggcctgttggtgagcgacttgctccaggcgattatcccgttatttgagctggacagttatgcaccgccgctggtgatgatggcagcggtagaaggtgacactctcgatcctgaagtagaacgacgttaccgtaatgcgctttcactacaagccccgtgtcctgacatcatccgcatcaatcgttttgcgttttatgaacgggcgcaaaaagcctttgcgatcgttatcacaggcgaacgagcgaagtacgggaatattcttttaaaaaaaggggtaacaccgtaatctcataccggtacgcccgcatgacgcgggcggttatcgaatgatggggtgaaaaatatgaaagcggcacgccagcaagcgatagtcgacctgctgctgaaccataccagcctgaccacggaagctctctctgaacagctaaaggtcagtaaagaaaccattcgtcgcgatctcaatgaattacagacgcagggtaaaattctgcgcaatcatggacgcgctaaatatatccaccgtcaaaatcaagacagtggcgatccctttcacatcaggctgaaaagccattatgnnnnnnnagcagatatcgcgcgcgaggcgctcgcgtggattgaagaagggatggtgatagccttagacgccagttcaacttgctggtatctggcacgccagttgcctgacatcaacattcaggtcttcaccaatagccatccgatttgccatgaactcggtaaacgcgaacgcattcaactgatcagttccggcggcacacttgagcgcaaatatggctgttacgtcaatccctcgctgatttcccaacttaaatcgctggaaatcgatctgtttattttttcttgtgaagggatcgatagcagcggcgcactgtgggactccaatgctatcaacgctgattacaaatcaatgctattaaaacgcgccgcgcaatcgttgttattgattgataaaagtaaatttaatcgttcaggggaagcccgcatcgggcatctggatgaggtaacgcacattatttctgatgaacgccaggttgcaacttctttggtaacaggctgacggaaagggtagcaggccggagacgacgccccggccttgcctgttatcgctcgtcgcgacgaccacccaccgcagcccagatacggcggacgtgcaccgtcacttcttcgcgatcgtgatacaactgccgcgcctgaatctgagcatttatgccatgttcatcaagctgtgcctgaatatacgccagattgtgtgacacttcttcgtagcgttttttcatcggcagtttgaggttgaaaatggtttcacgacaccagccattaaccagccactgcgccatcaatgccgcaactttcgccggtttttcaaccatatcgcataccatccaggagatattgctgcgcgtcggacggaatttgaaaccgtcttcccgcagccacgtcacctgtccggtatccatcagactttgcgccatcgggccgttgtcgacggaataaacccacatgttgcgcttcaccagttggtaggtccagccgccagggcaagcgcctaaatccaccgcccacatcccgttcgccaggcgttcatcccactcatccgcaggaataaacacatgaaatgcctcttccagtttgagcgtggaacgactcggcgcatctgccggaantttcaggcgcggaatgcccatatagaacggcgaattattgttgctgtatgagtaaccggtatagcagcagcctggtgcaataaagaatacatgcacaaccggacgcttcggcgtttcatagttcgccagcaccccggcatcgcgcaaggcagcgcgtagcggcacggtgaatttacggcagaatttcagcaactctttgctttcgttggtatcggcaacttcaacacgcagttcaccgcccttctctactacgccctgcaacatgccgacaatgggggtaatacgatcttctggcggcaaatgctgcaagagttcccccaccacaaaccactggcgggcaaaaattaatgaactgaacggcagctcacggattaacttatcgccatcatcaggttgataacattcataaatgacataacccgcattctctttcacgcgggcaaaaccgaaaatctcccgctggccggntttatcggtaatttctgcggcgcactctttttcaaagcccggacggcacagcaatacaaccttattcatgacttacgcccttgcgctttaaacggatagcaccaactaacattaacgcccagcccgcaaggaagctcacgccgccaaccggagtgacaaacgcccacaaacgcagatgggacagtgccaggcaataaaggctgccgctgaacagcaccgtgcctaacgcgaggaaaacgctactccagtaaaaccagatactgatgcgacgctgcattgccaccgccagacctaagatcgccagcgtatgaaacgcctggtattcgaggccggtctggatccagcccatctcaacggcccccatggttttacttaacacatgcgcgccaaaagcgcccagtgccacaaaaatgaagccgctaatggcggcgaaaatcagcataaaacggctggtcatggtcgtaccctacgtaaattattgttcataacgaaagcggaatttttcttgttcagcagcggctttcgccaggatccattggcgaaaggcggctattttacccagttctgcctggctgtcatgacaaaccagataaaaagcgtttttactgaccagaacatcattaaacgggcaaacaagacgtccggcttcaatttcagattgcgccatcacgttatttgccagcgccactccctgcccgtgaatagccgcttgcagcaccatggcgctatggctaaaaattggcccttgctgaacgttgatatgatttaaccccaattgacgagtatatgtctgccagtcacggcgtgacgcatcatgtaataacgtatgtttagccagatcttccggggtcttcaagggtttttcgccagtcagcagtagcggcgaacacaccggcaataaatattcggcgtacagtttttccacccgtagccccggccagttgccccgaccataaaatatcgccacatcaacatcatccgccagcttatcttcctgacgatcaaccgcctggattcgaacgtcaattcccggataagctgaattaaagctggaaagtcgcggaaccaaccaatgaatggcgaaactggggagtaaactgaccgtcaacgcccccttggcgctacgggcctggagtttacgcgtcgcttcggttaattgcgaaaatatctctttgatatcgaggaaatagctttgcccttcctcggtcagcaggagtgaacgattacggcggcggaacagttttagccccaaaaaatcctcaagagacttgatttgatgacttactgcggcctgggtcacaaaaagctcttctgctgcgcgagtgaaacttaaatggcgtgctgcggcatcaaaaactcgtaaggcatttagcggtggtaatcgtttagacatggcttttaaactttgatgttaaatgaatttaacaattagatcacactgtgtaacctattagtttttttaatctgagccattataaattgtccgttgagcttctaccagcaaatacctatagtggcggcacttcctgagccggaacgaaaagttttatcggaatgcgtgttctggtgaacttttggcttacggttgtgatgttgtgttgttgtgtttgcaattggtctgcgattcagaccatggtagcaaagctaccttttttcacttcctgtacatttaccctgtctgtccatagtgattaatgtagcaccgcctaattgcggtgcttttttttaccttgcgatcgcgaattactgatccagttcgaccatctctttcacgtcggnacggttgatctgctgtttgttgccattagcgtctttatacgaaatcataccggtatcgttatcagtctgtggtttgccgtcagagacgatggtacgtccgtcattggtgtgcatcacatagttcgaaccggaacaggcgctcagnnnnnnnntcagcatacaggcagaaataattgcggcagtctttttcatcatcttctccttaaagcgattaataaatcttaatagtattgattaacaggctaaaattaacgcctaacactattcagcatatgttactgacgcggcttcgccaggatatccagataattctgatggttagcactctccttgtatcaaagtgaattttgcgtcacgatcggtgcatcaagccgaggagcaccatgaacgtttttaatcccgcgcagtttcgcgcccagtttcccgctctacaggatgcgggcgtctatctcgacagcgccgcgaccgcgcttaaacctgaagccgtggttgaagccacccgacagttttacagtctgagcgccggaaacgtccatcgcagccagtttgccgaagcccaacgcctgaccgcgcgttatgaagctgcacgagagaaagtggcgcaattactgaatgcaccggatgataaaactatcgtctggacgcgcggcaccactgaatccatcaacatggtggcacaatgctatgcgcgtccgcgtctgcaaccgggcgatgagattattgtcagcgtggcagaacaccacgccaacctcgtcccctggctgatggtcgcccaacaaactggagccaaagtggtcaaattgccgcttaatgcgcagcgactgccagatgtcgatttgctgccggaactgattactccccgtagtcggattctggcgttgggtcagatgtcgaacgtaactggcggttgcccggatctggcgcgagcgattacctttgctcattcagccgggatagtggtgatagttgatggtgctcagggggcggtgcatttccccgcggatgttcagcaactggatatcgatttctatgctttctctggtcacaaactgtatggcccgacgggtatcggcgtgctgtatggcaaatcagaactgctggaagcgatgtcnccctggctgggcggcggcaaaatggttcacgaagtgagttttgacggcttcacgactcaatctgcgccgtggaaactggaagcaggaacgccaaatgtggctggtgtcataggattaagcncggcgctggaatggctggcagattacgatatcaaccaggccgaaaactggagccgtagcttagcaacgctggcggaagatgcgctggcgaaacgtccaggctttcgttcattccgctgccaggattccagcctgctggcctttgattttgctggcgttcatcacagcgatatggtgacgctgctggcggagtacggtattgccttgcgggccgggcaacattgcgctcagccgctactggcagaattaggcgtgaccggcacactgcgcgcctcttttgcgccatataatacaaagagtgatgtggatgcgctggtgaatgccgttgaccgcgcgctggaattattggtggattaatgacgaacccgcaattcgccggacatccgttcggcacaaccgtaaccgcagaaacgttacgcaataccttcgcaccgttgacgcaatgggaagataaatatcgccagttgatcatgctggggaaacagcttccggctttgccagacgagttaaaagcgcaggctaaagagattgccggatgcgaaaaccgcgtctggctgggatataccgtggctgaaaacggtaaaatgcacttctttggcgacagcgaaggacgtatagtgcgcggcctcctggcggtgctgttgactgccgttgaggggaaaaccgccgccgaattgcaggcacagtcgccgctggcattgtttgatgagctgggattgcgtgcgcaacttagcgcctcacgcagccaggggttaaatgcgttaagcgaggcgattatcgctgcgacgaagcaggtttaagcacagaaccgggtcggataagacgtttgcgtcgcatccgacctgattgtttacccctgacgcgccgctttcgccatcatcttcttcagcgcatgagaaaccgcaacaaaaccaaaggtggcggtcaccatcgttgccgcgccaaatccagatgcacaatccatccgctttggtccttccgccgtggctttcatcgcacacaccgtaccgtctgactgcggatacaccaatgcttcggtagagaacacgcaatccacaccgagcttacctttactgtttttcactacgccaaaatcgcttttcaggcgctcacgcaacttcgccgccagcgggtcctgaatcgttttcgccagatcggtaacctgaatctgcgttgggtcaatctgcccacccgcgccaccggtcgtgaccagcgggattttattgcgccgacaataagcaatcagcgccgctttgggccgtacactatcaatggcatcaatcacgtacgaataacccacgctcatatgctgcgctacgttatccggcgtcacgaaatcatccaccaccgttacacagcactccgggttaatctggcgaatacgttccgccatgacttccgcttttgccagcccaacgttatcgcgcagggcatgaatttgccgattggtattggtgacgcacacatcatccatatcgataagcgtgattgcgccaatccccgtgcgcgccagcgcttccgccgcccaggaaccgacaccgccaataccgaccacacaaatatgcgcgtcagcaaacagttgcaacgctttttcaccatacagacgcgctgtgccaccaaaacgctgacgccatgcatcactaattaccacagacatagcacctcagaattaaaaagggcgaggttatccctcaccctaaacgcataaatgcctgatgcgctacgcttatcaggcctacataactcctgcaatattttggatttgcatgatttgtaggccggataaggcgttcacgccgcatccggcatgaacaacgcgcacttagtcaataatcaggatgtgaggttacccctcaccctgtcatatccgtaaaaacggcatacagaatatcacatcagccgctaaagacgttacctgcgcccggggcggttttcagcacccagacacgtccatagtggttgtaccaacctgcgcggtgtccggcttccggcccgatcccttgataaatatcgaagtgttggcctttgattgcgccaccgacatccaacgccaccatcagacgcaattcgtactgaccgttaaatttgccgttattatccagcagcggcacttctgccagcaaggttgtacctggtgggataatggaacgatcagaggcaacagaagcacggccaaccagcggcaccgcacttgcccctttcaccggtgcaaaagattgcggtttaaagaaaacgaaagacgggttctgttccagcagctcgcgaacctcggcttcactgtgtgtttcgccccaatgacgaatcgcctgcatcgacatatcttcttttttcacttcgccacggtcgatcagcaccttaccaatgctgcgataggcatgaccgtttttccctgcatagctgaaaaagttaagcggactgccatcaccaaagtcgatatacccactaccctgcacatccataatgaaattatccatcagagagttgctgtaagcgaggatgtacttatcgctcaatgcacccgcgtagatctccgcacgagacggcagacgaccacgttttggcggcatacggtaaataggatactggaactcgccctggcgggtatggcgcgcctgaattaccggcgtgtaatagcctgtaaactgcacgttaccatagttgtcggcaccttccatctgccaggcatcaatgccgaactggcgcatattgcgggtatcaccgcctgcgcgcagccactcttgcaccgcgttataaacattactctggttgccatacagacgcggtgacgaattacggatatggttaatttgctcggcaaaatcaccggcgttaatcggcgcgccaacggcatctggctggttcaccagagagaaaggctgggtaaatttcccgtctttatattgctgtccgcgatcggttggtttggaagagcaggcggcaagcattgccacaaccgtgcccataagaaggtactttacccaacgtcctttcattgttctcttcttcaggttaaaaaataaggcgcaacgaagataacaaaccaccgcgtttaatgaaatgagcagcctctccctgacgcaaattttgcacaaaaaataggctttagtgatttgtttttgttcaaaatcatgccagatccgtgatcggggtaaaaaaaaggttgcatgaaaacgcgagcggagtatagtgcgcatccacggacgcggggtggagcagcctggtagctcgtcgnnnnnnnnnnnnnnnnnncgtcggttcaaatccggcccccgcaaccaattaaaatttgatgaagtaaagcagtacggtgacnnnnnnnnnnnnnnnnnnnnnnnnnnnnnnnnnnnnnnnnnnnnnnnnnnnnnnnnnnatccggcccccgcaaccaannaaatttgatgaagtaaaagcagtacggtgacgcggggtggagcagcctggnngctcgtcgggctcataacccgaaggtcgtcggttcaaatccggcccccgcaaccaattattgaacaccctaacgggtgtttttttgtttctggtctcctataaaaaagcgccattcagcgcctttttatcatccccttctcgccagggtcgccccatcggcaaaatacgctttaattcccgcaagaatagactccgcaacttcctgctggaaggtcgccgttttcagtttacgctcttcctcaacgttactgataaacgccgtttcgaccagaatggagggaatatctggtgcctttagtacggcaaacccggcctgttcaacttgatttttatgcagcttgttgattttaccgagcttattcagcaccgctttaccaaacttaaggctgtcagcaatggtcagcgactgcaccatatcgaacatggtgtggtcgacatagcggtcaccgcttttgctcacgccaccaatcaagtcggaggcgttctgggtttgtgccagatattttgccgcagtactggttgcacctttggttgagagcgcaaacaccgaggaaccgctcggctggcgactggtaaaggcgtcggcatggatagagacaaacaggtcagcacgctgtttctgagcttttgctacgcgcacttgcaacggaatgaagatgtcttcattgcgcgtcatgtacaccttcatattgccctctttctcgatcagagagcgcaaacggcgagctatttgcaataccacatctttttcgcgcgttttgtatttccccaccgcaccggagtcttngccaccgtggccagggtcaagcataatgacaatcggacgatcgcgccctgctttacctggttgtggaccactttgcgctggcggcacctgcttttcgaggtcgcctttgttgtaatcctccagcagcgccagcagcgggtcctgcatatcctgtgcattggccggatagaggtccatcaccagacgctctttaaacccggcgaccggcgcaagggcaaacagctgcggttttacgttttgctttaattcaaaaaccatccgtacggtttgcgggtcaaattgcccnacgcgcgccgacttgatgaacgggtcgtctgcacgaatttgtgccgccatccccttgagtaccgagttcaggtttacatcttcgatatccaccaccacgcgttccgggttantcaacgcgaactgcttatatttcagctgacgatttgattctaccgtcacgcgggtgtagctggacgcaggccagacgcgcaccgccacgacctggctgaccgcagccagactgacctgacttacgctcaatagccacatggcacccgcgcnttgcagtaaacgacgacggctgattgcagtgttggatcctgacatgcctctcccgagcaaaagaaatctaagctgtgtaacaagtaaacgactaatttgaccggaaactttagcgaaagacgcataatctgtcatctaataaacggtaaacattctttttatattcacgccattactgataaaaaagtcgctctcgcataaaatttacacttgcaccctgcgaaaaaacagaataaaaatacaataaattcgaataataatgcaaagaggtgtgccgtggtaaaggaacgtaaaaccgagctggtcgagggattccgccattcggttccctatatcaatacccaccggggaaaaacgtttgtcatcatgctcggcggtgaagccattgagcatgagaatttctccagtatcgttaatgatatcgggttgttgcacagcctcggcatccgtctggtggtggtctatggcgcacgtccgcagatcgacgcaaatctggctgcgcatcaccacgaaccgctgtatcacaagaatatacgtgtgaccgacgccaaaacactggaactggtgaagcaggctgcgggaacattgcaactggatattactgctcgcctgtcgatgagtctcaataacacgccgctacagggcgcgcatatcaacgtcgtcagtggcaattttattnntnnncagccgctgggcgtcgatgacggcgtggattactgccatagcgggcgtatccggcggattgatgaagacgcgatccatcgtcaactggacagcggtgcaatagtgctaatggggccggtcgctgtttcagtcactggcgagagctttaatctgacctcggaagagattgccactcaactggccatcaaactgaaagctgagaagatgattggtttttgctcttcccagggcgtcactaatgacgacggtgatattgtctccgaacttttccctaacgaagcgcaagcgcgggtagaagcccaggaagagaaaggcgattacaactccggtacggtgcgctttttgcgtggcgcagtgaaagcctgccgcagcggcgtgcgtcgctgtcatttaatcagttatcaggaagatggcgcgctgttgcaagagttgttctcacgcgacggtatcggtacgcagattgtgatggaaagcgccgagcagattcgtcgcgcaacaatcaacgatatcggcggtattctggagttgattcgcccgctggagcagcaaggtattctggtacgccgttctcgcgagcagctggagatggaaatcgacaaattcaccattattcagcgcgataacacgactattgcctgcgccgcgctctatccgttcccggaagagaagattggggaaatggcctgtgtggcagttcacccggattaccgcagctcatcacggggcgaggttctgctggaacgcattgccgctcaggcgaagcagagcggcttaagcaaattgtttgtgctgaccacgcgcagtattcactggttccaggaacgtggatttaccccggtggatattgatttattgcccgaaagcaaaaagcagttgtacaactaccagcgtaaatccaaagtgttgatggcggatttagggtaagcgatgaaaatcgtcggatgcgacatgcgtaacactcgtacgtcgcatccggcaattacgtttattcccgtgaantaaacaacgccgccagaccactgcgcngctcagtacgagtggcgattgccgcacttaatatgcgctcatcggcatacagcgacagacggcgacgcgcgcgggtcaccgcggtataaaccagctctcgcgttactaccggcgtgcgttggctcggtaaaatcaacgccgcatggtcgaactccgatccctgcgatttatgtaccgtcatcgcccacgtagtttcgtgctctggcaagcgactcggttgcacagacttaatattgccgtccggcatcgcaaaccagacgcgcgtcccctgcccgcgatccagcgcaataccgatatcgccattaaacaacccaagcgcgctgtcattacgggcaatcatcaccggtcggccttcgtaccaacgagagtgcggattacgatgaattttgcgcttctgttgcataaactgctcaattcgctcattcagtccagccacgccaaatggcccttcccgcagggcgcacaaaagttggtactcattgaacgcctgaatgattaaatccggctcggcacgcgcttgcagcagatccagataacgtccataacccgcaagagcttcctcaagcatcgcaatataatcttcgccgctctgtaaaagccgtttttcaatatcagtaaaatcctgctgaaaaacggttttcactgccgttttatcaccacggttgatcgccgcagctaactgaccaatgccagaatcgctgccgaaacgatagcttttttgcagcaggcagagactgtcgcgcaaagatgccgcttctgtgccagttcctgccggaacgtgagttcccgtcaggcggcttagctgcccggcacgctcggcggtaaagccggcattggcataagcgcagatatcgcccagcacagccccagcctcaaccgaggccagttgatcacgatcgccgagaaagatcactcgcgcatgatcgggcaaggcgtcgatcagtctcgacatcataggcagatcgatcattgacgcttcatctaccaccagcacatcaagatgcagcgggttaccggcatgatgacgtaaacgctggctacccggctgcgcacccagcaatcggtgcaaagtactggcatcttccggaatacgtttcttttgttcatcggtcagcggtaactgtcgcaaagccttgccgagagattcggttaagcgcgcggcagctttacccgttggtgcagccagacggatacggcagcgttcgccgtcggccatttgaattaacgctgccagcaacttcgctacggtggtcgttttaccggtgccagggccgccggaaatcaccgagatccgccgcgtcagcgccactgctgccgccactttttgccagttaatttcatcaccagtcggaaagagtttatccagggtttgcgccaacaaggcttcatccacctcgatggcatgattcacctcattgaagaagcgcgctaccgtccgctcgttacaccacatgcgattcaaataaagacgatcgccacagaggatcatcggcgtgggttcatctccccggctgaccgcttgtgaagccagcaagcattcttcccaattttgtagctcaccgatttcactgacacaggtcgccaacagcggatgcgactcctcattattttccagtcgtgaaagcggcaaacaaacgtgtccctctccggcatcatgacttaacagtgccgccgcgagggtgacggcaggatgttcatctcccgccacggtcagggcaaactgcacgtccagcgggcgtagctgtttgtgctccacagcttccagtaattgcttttgcaatttcattacgcctcctccagagtcataccggcaaacatctcatccatcaggtcaatcaacccggcgttggggcgggttgtgtaaatcccttgttgcggatgttctttatcaacaccacgcaggaacagataaataacgccgccaaagtggcgctcatagtcgtaatcagcaatgcgatggcgcagataacggtgcagcgccagggtataaagctgatattgcagatcatagcggtgtgcctgcattgccgctgccatagcctgttgggtgtaagccgaactatcttcacccaaccagttggatttatagtcgagcaggtaataacgcccttcgtggcggaacaccaggtcgataaagccttttaacatgccacgtacctgcatgaactccagcggcgggcagccagcggatagcgggtcaaactggcgaattagtgcatcaagctggctggcgatgagcggttcgctaatcggcaggtaaaactccatctccacctgtttatcgcggtcggaaagctgactcaggctaacacccgtttcattgagaggtgcctggaggacagccgtgatccactcggtcaacaccggttcccactgcgattcaaagccgccgagttccagtttttcctgtacccagttcgggtcaaccggctgggtaaaattgaggtcttcaaacaaactgtgcaagaatgtccccggtgacgcnnnncgcgggaactgatgcggtgttaacgtcggttcttcaacgacgctgaccacgcctgcggcatcaacatccagccgtggcatcagatcctgagcgataccgtgaccacgctgctgcaagccggagtagctggtgacacgccagttatcgccgggcaatcgttgtagcgtcctcgcattcagttctgcagttaaagcatcattaacctgccagggctggttatcaccagtttgtgccgtttgccaggcaatatcatcatcgcataacgcttcaatacaggtgcgaagccctgccgcatcttgcggttcccctttttgcagcaaacgcccgagggcactttggtggacgtcggtgtcaccttttttatcgccacgacggcgcaccagcggtgcaacgccgagactgcaatgccaaaccgaacgcgtcagcgccacgtaaagcaaacgcagatcttccgccagacgttcgacctccgcaagatcgacgctttctggcgcagcgttaagatccagaacagcctcaaacgagtggcgatcgtgataaaacgcctgatcctggacgcggaaattggtaataaatggcaaccagaccagcggatattccagcccttttgatttatggatcgtgacaatctgtaccagatgtttatcactttcgaggcgcatttgttggctggaggcattactgtctggctcgaggatatgttgcgataaccagcgtaccagcgcatgttcactttccagctgcgttccggcttcttgtagcagttcgctgatatgcaagatatcggtaagacgccgctcaccgcctgccgttgccagcaagttttctgcaatgttacgcgccgacatcagcgcccgcagcatcggcataacgccacgtttgcgccagatttgccgataaccatcgaactcttcgaccaccgcgtcccacgcatgttcgtcattattcagcgtttcgatatccagcgcgttcagccccatcattgacgttgccagcgcactacgcagggtgttctcacgttcgggcgtcatcaccgcctgcaacaaccaaagcatttcctgcgcttccagagtttcaaaaacactgtcgcggttcgaaaggtaaacggaagggatttccagcaacgttaaggcatcgcgcacctgggcggcctcctggcggctgcgcaccagcacactgatgtccgaagcacgcaccggacgcgcgtcgtcgccgttcatcagcaacgcttcgccccgctgtccggcttgtagccagtcgcgaatttgcgcagcacttacctgcgccatggtactttgatagtcgccaacgccgcagctttcgccttccatcagccacattttcatcgcaggctgcgtttcacctttaaagacaaaacgtaacgcctgatttttcccggctgatttcactggaataaacggtatttcgcgaaacatgaacgcgtcatcagtctggctgaaaagcttgttcacactgttcaccattccaggtgcggagcgccagttggtgtctaaagtgtagtgggcgtgaacttcactacgcgccttcatataagtgaagatatccgcaccccggaatgcatatatggcctgcttcgggtcgccaatcagcaacaatgcggtttccggctgatggtgccagatacggcgaaaaattcggtactgctgggggtcggtatcctgaaattcatcgatcattgccaccgggaatcgcgtacggatcgccgctgccaacacctcaccgctttcgctacgcagcgcggaatcgagccgacttaacatgtcatcaaaacccaattcgccacggcggcgtttttcacgcgctactgtttcgcggatctcagccaatgcgcgggtgatcaccagatcgcggatcgacaatggttctgcaagcagttgatcgatcgcctcaaacagtggatgtcgcggggtttcccccccggccttcgtgcgatcttctaagaaacgctgggagaatttttccagcgactccggcaactgataactgtttgtctcttcttctgcccaggcgctgatcttgtcgatccatttagcctgattgctacggttaaacttgcgtcgatcaataccagaagattcgatcagcgcatccagttcacccactgcgtcgcgccactgctgttttaccgtatcaatacgcgccacaatttgcgcgtgacgggaagccagcgtttcatcatcgggcggcggtgctttgataaccggcgcttcaccttgcagataacgattaatatcgcgcagcaacgcctgcggccctttccaggtttcaaagacgacctgggctatttcacgcggcagcgggtagcagtggcgacgccagaaatcggcgcaggcctggtaacgtagcagagactcatcttcaatcagctgctgctcaaacagcatgccggattcaaaggcattcaggttgagcatgcgctggcaaaaaccgtgaatagtaaagactgccgcttcatccatctgccgttcggctaacaacaaccacttcgcggcttgcgctttatcgtcgatctcttccagcagacgttcgtacagtggattgtcggtggtttcacgcagacaggcgatgcgcaactcatggatattgctacggatacgaccacgcaattctgccgtggcagcctcggtaaaggtgaccaccagcagttcttcaacggtcagcgggcggggaaaggcggcggaaccgcctagtccaagtaacaggcgcaaatagagcgccgcaatcgtaaaggttttgcctgtgccggcagangcttcaatcaggcgctcgccctgaaagggcaagcgcaaaggatctagtgtctcggcgacatcactcattcttttcactcatcaggggcattgtttgctgcaacgcgctgacgttctcccacactttccagccttcaggatgcacatattcggctttcccgttctggctgccggaaatctgcgacagaatagccatgccttgcggctcgaccaccgcctgatggaagaaatcagcaagtttttgcggcgtcagcagttttatctgggccacgattttatcacgcgaatcgaagcgcatattgccgcgatcgaaatctttacttaacttcgatgcttcttcgccgagcgtttgcggtgcctgcagcatctgggtaattaccgcctgctggatttgcgcaaactcatctggcttcatcgctcgcaattttgcctctgcggttgggaaaaacgccttgtaacgctcccacaagaatgaaggctgtttatcattgctttgcaaaaggaagcccatgccccactgacgccccacgctcattggaaacgcaaacacggcatagcccaattgttcttcggtacgcaactgattgtagaaccacggctgtacgatctgccccaacagagagctataggctgagcttgtgtattcatcgtagccagtcggtacaaataccgctgccagtgcggagtcggtgctgttaccggctttttcaaagatgacggattgttttttatcgaccactacatctttgtttcgacaccactctgaaccatcagcgcccaactgtttttgcacatcgcgtgccagcgttgttgcctgggcctcggtcatgttgccgataaccataaactctggtcgagcccctgattttaaggcgtcacgataagccagcacctctttcaacgtaatggagggcaaaattttacgccgttcatctcgcgagaagtacggcacttgcgagagcatctgcgcgggcataatcgcctgctcaaacgctttacccttttctgcggaatccatcatctggttataccaggacttcgcctgctcaagctgatcttccgtagcggtatagctaaagtatccctcgagcaatgcctggaacagctgcggcagacgctgggtgtaaccattagcattaaccataaggccgttgttagcgttggtggaaaaacttatgccaccaaccgacgcctggttgcttaactgatcaagcgccagccctgcgagataatcattgagcgcaaacatcacctgattgcgggcgctgtccatggctttcggattacgcaaaatcaggctgacatcagctttgggttcgctggaaaaataacggcttggcgcatacaccacgcgcagattcgactcatcaacaatcagctctggatggtcatatttcttctctgacttaatcagcgagaaatcgtcaggaatataggggttaagctccggtaaggagagcgcaatattggcagctttttgctgccagtcagcgaaagtttgttcgctgattttatcgacctgatacggcgcatcgataaaataagccgttttattgtgcggctctttcgggctgatataccagatacgcgcattctgcggcgtcatcatcgccagacgttcttttactgctttagcatcgtaccgatcggcaatattgactgcatccagcgtatgctcaacaggaacgcgaatcatggtatctgccagccattcgacgtaatccatatcacgggtgattgacggataacggaagtcgatatccagcacattcgccagttcatcgaagtattgtttatcgatccctttttcacgtaacaaattgaggtagctaaaaatagccgccacaacctgatcgcgattcgccagacctttatcggttaaagacgcagagatcgctaatacgccgctgttgccgttgacgataggatcggagttggcgctaatgccctcaactaacccctgcttttgcagccagtcagacagtgtacctgggctgcgattaccaatcagataggtaatcaattcatccgttttactgcggaacttcgctgagttgttatcgatgcgaaactcaacgcgcagaactttacgcggcagcgctgggacgtaatgaatgataatgcccttttgcgcgtcggtgactaccggcacggtgatttccggttttttgctctctttgttcggcacgcgaccaaaagtgtccgccgccatttttgccaactccggcagcggtttattactgtaaataaccgccttcatcaaattggcggaatagtacttctcgtggaaatctttcagcgcctgctgcaccggattaccaggtttgtcgcttaaagtttcgaggttaccaccagaaaactttgaaccggggtgtgccgggttaatggtttctgcgctgacctgtgccatgcgcatcccgtcacgcgtacgcgccatggttaattcagcgttcactgcattacgctcacgttcggcgtatttcttgtcgagcaagggttctgcaatagcatcggccaggcggtctaccgcaccgggcaaggcgtcgttctcaacttccagatagaaagccgtgcgatacggcgcantgctggcattgtgactaccgccgtgcattttgagatattcggccagactgtcagcctgcgggtactttttcgaccccatcagactcatatgttcaaggtaatgtgccagcccctggtacgcctcgggatcttccagcgacccaacgggcaccaccagcgccgatagcgatttaactgcctgcggatcagaaaccagcaagaccaccataccgttatccagacgtatagcctgatactggcggttatctttatcacttttacggatggtttcctgaatcggctgccatcccgtttctgcctgacttaagggtgcccaaagggcaactaacaacaataatgctttgaaccaggtgctgcggggcattcacggacctcataatcaactttattttctggccagattcaacaggttaacgcaaatcatctgccagaatttaatcttgtgctgcacgagtcagcctatgtttatataaccatcagtccgtgactggtgcgcatcataaagtaagcggatagattgcgcaatttttatacagcgctcatgactgattaaagcgaaacagcggtaacaggaaacgttgcgactgttcaacgattgcctccattgtctctggtgttaattgccgccagagcctttgataccagatatcatcaccttcgccacgcaccatcatgttgccttcgtaagcctgaaggaatttcgtacgggctttttgcaacgtggaatcgtcatccagcatggcatcgttttgcgcgtcataacaggtttttagccacgcgccgccactttcaggtaacaccagcaatggcgcggacatcccttcacgatacccctcaatcagttgtgagaggtaatgcaaagcctgttcggctgcaagcggcggaaaacgccactcgccgtctttgcgtagaaaaaggcgactttcaccattaccaccgctggcacagtagacaaggtgttccagccaaagttgcattccctgcgccacacttaataaagagggacgccagcgcaacaagccatccggctgcacctgcggcaaccagccagttatctgcacaccgttgcaagcgagatcaatttccatactctgccccggctggcgacaggcaatgactctgtcggcaagctgctgcatctcctggcactgtgtttcccagaaaatttcaccaaaagcgccatacggtaaatcccctgccgcccggaagcggcggaacaagcgttcggcatcatcctgctcaaccagtgcattcaataactgctgattgatttgataacggctaagtccttccagaataaatggctcggtgtcggggatttcgctgtcttcagtacggaagttcacctgcaaacgcatctggaagaacgcccgcaccggatgtgcccagaatcgttgtagcgtttccagcggcacggtttccggtaaggtaaacggcagcggctgaacaaattcagaatgtgctttaccagcctggctggccgcaggtagccattcacgagcatagctttgtcgttcgcctggctggtagttttgcggatcaaacggcatccgggtatggaggcaagtaagatgcgcttttacccttgcctcgctttcatcacagttgagcgcttcatcgcccggtagataatgactttgcccgatgtagtcgatcagttcctgcaccagtaccgacgggaaacgttcactgttatcctgaatggaacgcccgatatagctgatatagagtttttgctgcgcggaaattaacgcttccaggaacaggtagcggtcgtcatcgcgacggctacggtcgccacgcttcggtttctggctcatcaggtcaaagcccaatggcgcaagctgacgtggataaacgccgtcgttcattcccagcaggcaaaccactttgaacggaattgaacgcattggcatcagagtacaaatgttaaccggcccggcgagaaaacgctggctgatacgttcttgatccaggcgctgtgccagttcatcacgcaatagtgacagcggcaccgcatcgccatactgcgcacctaaaccttcggcgataatcgcctgccattgttgttcgatcagcgtcatcgccgcttcggtttccgcatccggcaggaagagggcgttgagcatatcgcgacaaaccggcaaccactcttccagcggacgctcctgtgccagcccgcgacgccagatgtttagctgcattagcagtgaagccagatgccccaccagttctgcaattaagccgctcgattcatcataaggtagaaccgattgccactcgccctgcgcgctctccatcgcgtagcccaacaacatacgcgtcaggccaaatcgccaggtgtgttgtccggtggcggggagttccagctcgcgaacgttgtcgtcatctatcccccaacgaatgccggattcgttgacccactgacgtaaataacgcagcccttcttcggtgatgtcaaaccgcgccgccagcaccggcacatccagtaatgccagcacgtcttccgacacaaagcggctgtctggcaacgataacaggctgataaacgcttcaagtacaggatgcgactgccgcgcccgacggtcggaaatggcgtaaggcaggtaacgatccgcaggtgcgctaccaaacacagcctgaataaacggactgtagctgtcgatatcagccaccatcacgatgatgtcgcgcggagtaagtgtcgggtcttcttccagcatcgccagcaggcgatcgtgtaaaacttcaacttcacgctgcgggctatggcaaacgtggaaggtgatactgctatccagtggatcaagcggacgtttgttatcgctacgggaaaactcttcgatgttcacaccagcaacggcgcggttttccagttccagaatgtcagactgaatgttatgcagcaggttatctggcgtcacatcgacaaaggcgtccagctcctggctgctctccaggtcagaaaggagataaatgtagtcgcgcccaagcttgccccatgaggccagcagcgggttgccgacatcctgttcaccatcgctgttaaagagctgcccggcattttcgctgtcgcgnnnnagcggtaattcgcgatcttcaaaactgtgtcggcgctggcgagtcagtagtttcgccagataagcaggatctttaatgtcgccccagtaataacggcaggggttggtaaacaggagatggatttcaatatgtttacccagcgcctggagcgcctggagataaacaggcggtaacgcggaaataccgcatataaagacgcgcgaaggtaaccccggcgggcaggtcgtcgcggactccagcgtttcgataaagcgctgatagagattggcgcggtgccagcgcggttgtccgagttcatgggtatattccaccagcgccttccacaacggcgcttgccaggcctgtgcctctcccagcccttcaaccaaatgtcctgtttcccactgtgccagccagtccggacgatagaccagatactggtcaaacaggtccgccgcttttgaggaaagctggaacagctttcgcttgtcgctatcgtcagtcagataatgccgcaacagggtaaagtcttcgcgctccagcaattgcggcagcagagtcatcagtttccagctcatgctctgtttgttaaaggcgctctctttggggatctccggtaacacccggacgaacatatcccagataaagctcgcaggcagcggaaaatcaatgtttgccgcaataccaaacttttgcgacagggtcatttgcagccactgtgccataccggtactttgcaccagaatcatctctggttcgaaaggatcgtccagccgttcgcgttcgacaataaactccatcaacgcttccagcacgtccagacgattggaatggtagacccttaacatagcggctcctgactactgacgattcgggcaatgcaggcgggtcatctcgcctgctctgcccccgggtgaaactagcgtaacgctgatgctgacacatcccgcctgcgatgtctgcattcggttgacctgccagttggcaggtggcgaaatcgcgcgcnnnngcgtttgctgccaaccatgccgccagagctgttggtactggtttctgctggtaagactgttcattaatgttcgctggaaacccgataacgcagtgacaatcatcaccatcaacaccatcgccaacattacctccggcaggctaaagccttgttgattcttcagggaagctgacataacgccccctctttcagcggacaaaaatcgctccagccgcgtggcgaaaaaacaatttttccatcaatgacttcgcctgttcgccacaacgaaacgccttcataaccggcaattaataaggcttcattatcttccagtaaacgcaaacaaacccgggcaccagtggcagcgtacagtaagcactgaactgcgggctgcgtctgccaggagtgcattttcccccacgccaacgccgactgaacgatggcctggcggcgcagtgactgactttccatgctcacgcgagaggcaaaactgcgatcctgctggctcattccttgtaatagcaagctacccaaaaccagcagcatcaggaccagagccagtgacgaaacacccttttcgcggttcacaggttgaatcctgtcacgctatagctggcatccaccacggtttgcggttcagacttactggcagcacgcatattaaccgtcaacaccggcgagaagccgctgacatcctgacgtacgacctgaaaagtgtcgataatgatggcatccggattagtgactttatcccagcccttaccttcacaggatgtcgcaccgcgtagcgtttccaacacttgctccttcagacgaaatccaatctggtcggactcttttaccggttcgcgatcccagataccgttactgttcgcatcccactgcacaatgatacagtcaccctgtccgacaatttccagcccttcgccggtacagatgccatgacaataacccgccctctggagatgcttcgcgacggtaaatacccgcagccagatttcatcttccagtgccagcttacgggtgctcgttaaactttcacgctgtaacgcaggcagaaagcgtgcagcccccaacaacaatacgctactgatcgccatagcaatcaacacttccagcagagaaaaaccttgctcttttacaggcatccttctgtttctccttgctgacaaagccggagtcttccccacggcgaaaccaccagccaccactcgcccgttgagtttttgaagccaatatgcccggcccatgcggtattgcgcaggccaaagaaagcaagcgaaggtgtcaggtcgctcatttcgacttcgggccagcgtggcacaaagaccaatggtgaactgccatgacaggtattcgccccagcaacggaactcacaaggcaccataacgtcccctccctgataaaactgatactgtggtcgcggttatgccagttggcatcttcacgtaaatagagcaaatagtcccgcgcctggctggcggtttgccaaagccgttgcgactgctgccagtattgccagccatagagtccacttgcgcttagcatgaccaaaatcagcatcgcgaccagcgtttcaatcagcgtataaccacgttgtgttttcatgccggcagtatggagcgaggagaaaaaaagacgagggccagtttctatttcttcggcgcatcttccggactatttacgccgttgcaggacgttgcaaaatttcgggaaggcgtctcgaagaatttaacggagggtaaaaaaaccgacgcacactggcgtcggctctggcaggatgtttngtaattagatagccaccggcgctttaatgcccggatgtggatcgtagccttcaatctcaaagtcttcgaaacggtagtcgaagatggattcgggtttacgtttgataatcaacttcggcagcggacgcggttcacggcttaattgcagatgagtttgatccatatgattactgtacaggtgcgtatcgccaccggtccagacaaaatcacccacttccagatcgcactgctgcgccatcatatgcaccagtaacgcgtagctggcaatgttgaacggcaggccgaggaagacgtcacaggagcgctgataaagctggcaagagagtttgccgtctgccacatagaactggaagaatgcatggcacggtgccagcgccattttatccagttcgcctacgttccacgctgaaacaataatgcggcgggaatccgggtcgtttttcagctggttcagtaccgtagtgatctggtcaatatgacgaccatctggcgttggccaggcgcgccactgtttaccatacactggtccgaggtcgccgttttcatcggcccattcgtcccagatggtgacattgttttcgtgtagataagcaatgttagtgtcgccctgcagaaaccacagcagttcatggatgatggaacgcaggtggcaacgtttagttgtcaccagcgggaatccatcctgcaggttaaaacgcatctgatgaccaaaaatggaaagcgttccggttccggtacggtcgtttttctgtgtgccttcgtcgagcactttttgcatcagttctaaatactgtttcatggttcctcaggaaacgtgttgctgtgggctgcgacgatatgcccagaccatcatgatcacacccgcgacaatcatcgggatggaaagaatttgccccatgctgatgtactgcacccaggcaccggtaaactgcgcgtcgggctggcggaaaaactcaacaatgatgcgaaacgcgccgtagccaatcaggaacaagccagacacggctcccatcgggcgcggtttacgaatatacaggttgaggataataaacagcaccacaccttccagcagcagctcgtaaagctgtgatgggtggcgcggcagcacaccgtaagtgtcgaaaatggattgccactgcgggttggtttgcagcagcaaaatatcttctgtacgggagcctgggaacagcatggcaaacgggaagttcgggtcaacgcggccccacaattcaccgttaataaagttgcccaaacgcccggcaccaagaccaaacggaatgagtggtgcgataaaatcagaaacctggaagaaggaacgtttagtacggcgggcaaagataatcatcaccacgataacgccaatcaggccgccgtggaaagacatgccgccgtcccagacacggaacagatacagcggatcggccataaactgcgggaaattgtagaacagaacataaccaatacgtcccccgaggaagacgccgaggaagcccgcatagagtaagttttcaacttcatttttggtccagccgctgcccggacgattcgcccgtcgtgttgccagccacattgcaaaaatgaaacccaccagatacatcaggccgtaccagtgaagcgccacgggtcctattgagaaaatgaccggatcaaactccggaaaatgcagatagctactggtcatctgtcaccacaagttcttgttatttcgctgaaagagaacagcgattgaaatgcgcgccgcaggtttcaggcgctccaaaggtgcgaataatagcacaaggggacctggctggttgccggataccgttaaaagatatgtatatgatccgcgctataaccctccgcgaatcagcccgcccatgccgcgacgctccataaaggctgcaacctgatggcgaacttcggtcgccagttgcgcttccagactacgctgcgcaagattttctgcttcggcataatcaatgcgccgcagcaggtattttacccgcgctacagaacgtccgttcatagacagatggcgatacccaagcccaatgaggattgccacgcacatgggatcgcccgccatttcaccgcacaaacggagatcgattccatgtatttccgcttcccgggcgatcatcgccagagctcgtaacattgcaggatgaagactgtcataaatgttcgccacccgggtattgttgcgatcaacggccagaatgtattgagtcagatcgttggtgccaacagagatgaaatcgacccgctttgccagatgcggcagcataaataccattgacggcacttccagcatgatgccgatacgtggtttgggaatttcgtaaccgatcatctcctcgacttcacgtccggcacgttcaatcaggcggcgtgcttcgtcaacttcatcgaggcttgtgaccatcggcaacagaatattcaggttgcccgtagcggcattagcacgcagcatcgcccgcacctggatcaagaagatctccggctgatcgagcgtaatgcgaatcccacgccaacccaggcatggattctcttcgctaatcggcatgtaaggcagctgcttatctgctccgacatccagcgtacgcaaggtgacgggtttatcattgaacatttgcagcatcccctgatactgcgccacctgttcttcttccgacggaaaaccactttgcagcatgaatgggatttcagtgcgataaagaccgatgccatcaatacggctgcccagtttttcttcatgttccgggcttaaaccagcattgagcatgacttttatacgctcaccgctttttaactgcgcgggtaaattgacgtcatcttccgccagacggctaagctcaatctcttcactaattagccgctgatattcttgcagcagtaccggctccggatcgaccagcaattcaccgcgatagccatcgacgatcagcgtccgacgatgcagcaccgaaggctgaatatccgcgcccatcacggtagggatccccagcgcacgtaccatgatcgcagcatgggagttggctgcgccatctcgcacgacaacaccgactaagcgatcctggggcagctcagcaagagttgtcgctgacagttcatctgccaccagaatgaaacgttccggccaggcgttcggcccttgattagcgtcatcaagatgaaacagcaatcgctgacccagcgcacgtaaatcgccagcccgctctttgagatagttatcgcttagcgcggcaaactgttcggcaaatttttcaatgaccgtttttaccgcccattctgccaccgagcctttatcaacctcggcaaacaattcacgacgcagccgggtgtccgaaagcaggtgcgagtaaagatcgaaaatagccgccgtttctttttgtgcaccggcggcaaagcgtttgctgtagcggcgaaactcgtttgccgcttcttccagcgccccggtcagtcgttcgcgttccagagccggatccagcgttgatgcctgatacacctgttccattaaaggtaacgtggcatcctgccagccttcggcaatcgccacaccaggtgctgccggtaatgcgcggattcgcgtctggcgatattgcccaaacaaggcagtcaactgcgactgagaaagaatcgctgccatctgggtggcaagcgtcaccaggaaggattcttcactttcgtcatactggcgcaactctcgttgctgtaccaccagtacaccaagcaactggcgacgttgaataattggtacgcctaaaaacgcgcggaaacgttcttcttttacggaggggatgtatttgaagctggggtgcttttgcgcatctgcaaggtttatcggttccgccagcctgccaaccaggccgacgatcccttcatcaaaggcgagcgttacagtgcgaccgcgtggttttttcagcccccgggtcgccatcaggtagtaacaacgtcgatcatgatcggccaggtagaccgaacagacctcggtatccatcgcaagacagatgtcggtaaccagaatatttaacgcctcattcaggcgtggtgcgctggctaccttttcgactatttcgcgcaggcgagtgagcataattggcgtgacttaacctcttttacgtcgataagcagatgcgttttgtggttttggcgtattttcctgcagtgacatcaccacactcgcgaactctttcattaccctacggtagacatcacgtttaaatgacaccacctgtctgaccggataccagtaacttacccatcgccagccgtcaaactctggtgtactgctggtttgcatattgatttctgcatcgccgctcaccagctgcaagagaaaccatttttgtttttggccgatacaaaccggcttcgtgtcccaacgcaccaaacgtttcggtaatttgtagcgcaaccagttacgcgttgaagcaaggattcgaacgtctttgcggcttaatcctacttcttcaaacaattcacggtacatcgcctgctctgcggattctccggggttgattccgccttgcggaaattgccaggagtgctgaccaaatcgccgggcccacattacctgcccctggcgattacaaatcacgatacctacgtttgggcggtagccatcgtcatcaatcaccggactacctcaaaatanagctttatatacgaatgattgtttcatactccaggaagacggtaaaccactctctgcagggcattacacactaacaacaattgaataactcacagttatgtgcagagttataaacagaggaaggggtggatagccgtttttattcaccttttctgtggatagagttgtgaagaactacggaattactacgggaaaacccggagcattctgaataagcccgatatagacattttaaaatattcattattagtcaatgcattacatgtaatttaagtaatgaaaaagagtaattcgtgacccaggtcacacctctcatttacgggttggcgaaagatcaaccaatgccgtatttatccacagaatgtgccactaagttaagcactgaaccactaaaaactggagtttcgtcgcacgtcaaggctgtaaatggaaacagtagtggaggtttttcacagttatcccagctttctgtggataacatggtgtaagatcctgtttattttcagtgaccagatttggaaaacccgttgcagtgttgcgcaactcgattaccggcaacctaaaaagcaatataaatcagataattgaacaacgcatgtggaaaaagttacactgcgaatattcggcacataattgctgtttgttttttaaccaaggtatcatgacatgtcccaacctcgcccactgctctctcctcccgaaactgaagaacagttgttagcgcaagcacagcaactttctggttatacattgggagaactggcggcacttgccgggctggttacgccagagaatttaaaacgcgataagggctggattggcgtgttactggagatctggctaggtgccagcgcagggagtaaacctgaacaagattttgctgctctgggcgtggaacttaaaactatccctgtggatagtcttggtcgtccgctggaaacaacattcgtttgtgttgccccgttaacgggcaatagcggagtgacctgggaaaccagccacgtgcgccacaaactcaaacgcgtactgtggataccggttgaaggcgagcgcagcatcccgctggcgcagcgtcgcgttggatcaccgttgctgtggagcccgaatgaagaggaagaccggcagctacgcgaagactgggaagaattaatggatatgattgttctcggtcaggttgagcggattaccgctcgtcacggggagtatttacagatacgaccgaaagcagcgaatgcgaaagcgcttaccgaagccattggtgcacggggcgaacggattcagacgctgccgcgcggcttttatttgaagaagaatttcaccagtgcactactggcccgtcattttctgatccagtagccatcgctttgacctgccgctttccgggcatataattaccgcttcatttttttggcagggctttttagatgttatttgcatggataaccgatcctaacgcctggcttgcgctcggtacgctgacgctgctgnagatcgttcttgggatcgacaatattattttcctttctctggtggtggcaaagctccccacagcacaacgtgctcatgcgcgccgtctggggttggcgggagccatggttatgcgtctggcgctgctggcatcaatcgcctgggttacgcgcctgacgaatccgctttttacaatattcagtcaggaaatttctgcccgtgacttgattctgcttctgggtggcttgttccttatctggaaagccagcaaggaaatccacnaatccattgaaggtgaagaagaagggctgaaaacacgcgtttcatcattcctcggcgctatcgtgcagattatgctgctggatattatcttcagcctcgactcggtgattaccgctgtgggtctgtcagatcacctgtttattatgatggccgccgtggtgattgccgtaggcgtgatgatgttcgccgcgcgctcgattggtgattttgtcgagcgccatccttcggtaaaaatgctggcgctctctttcctgattctggtgggctttaccctgattctggaaagtttcgacatccacgtaccgaaaggttacatctacttcgcgatgttcttctctattgcggttgaaagcctcaacctgattcgcaacaaaaagaacccgctctgatactccgtacgctctcctgcgggagggcgtactcacttctgttaccctcacagtttaagattttcctgctttcaagatatataacgtcagtttataaacagactattatcataggtgggccaaatgaggataaccggatgaaaaaatgggcagtaataatttctgcagtcggactggcgtttgctgtttccgggtgttccagtgattacgtcatggcgaccaaagatggccgtatgattttgaccgatggaaaacctgaaattgatgatgataccgggctggtgagttatcacgatcagcaaggtaacgcgatgcaaattaaccgtgatgatgtttcgcaaataattgaacgttaacaaataaggtcagcatccggctggccttaanatttttctctttcccttttcccttccctctgccatttttatattccttatgtcgtgattataaaaaggaaacggctatgcaatatcaccgtataccccacagttcgctggaagtcagcacgctggggcttggcacgatgacgtttggtgaacagaacagcgaagccgacgcccacgcacaactcgactatgccgtcgctcagggcattaaccttatcgacgttgccgaaatgtacccagtacctccgcgccccgaaacgcaagggttaaccgaaacctacgtcggcaactggctggcgaaacatggcagccgcgaaaagttaattatcgcctccaaagtgagcggaccgtcgcgcaataatgacaagggcatccgcccggatcaggcgctggatcggaagaatatccgcgaagcgctgcatgacagcctcaagcgtctgcagactgattacctcgatctttatcaggtgcactggccgcagcgcccaaccaactgcttcggcaaactcggttatagctggacagattctgcgcctgcggtttcgctgctggatacgctggacgcactggcagagtaccaacgagcgggaaaaattcgttatatcggcgtgtcgaacgaaactgcatttggcgtaatgcgctacctgcatctggcggacaaacacgatctgccgcgtattgtcaccattcagaacccttacagtctgttaaaccgcagttttgaagtaggtctggcagaagtcagccagtatgaaggggtcgaactgctggcctattcgtgcctgggtttcggcacgctgaccgggaaatatctcaatggtgcaaaacccgctggcgcacgtaatacgctctttagtcggttcacccnnnnnagcggtgagcaaacgcaaaaagccgtcgcggcgtatgttgatatcgccagacgtcatggcctggaccctgctcagatggcgctcgcgtttgtacgccgtcaaccgtttgttgccagcactctgctgggcgcaaccacgatggatcagctgaaaactaacatcgaaagtttgcatctggagttaagcgaagacgtattagctgaaattgaagcggtgcatcaggtttatacttatccggcaccataagattaacgccggttaaaaccggcgttaaatattaatgacggcgctgccagatccacagcgccgttattgccagcgcaaatagcgcaccgaagccaatgccaatgggcacgaccgggatgcctaccattaccgccagcgagtaaatgcccagcatcaacaacatggcgctgttttcgccaaggttttgtactgcaatcgcattccccgccccgacgctttttttaccccgctcctgtagcaacgcattgagcggaacgacaaaaaagccccccaacacgccaatcagcatcaacaaggcataggctggcagctgctcgtgttgcagggagaaaatcagtaccaccacgccaatcaaaattccggctggcatacagcgtgacacggtttccagcgtaaccagcttcgctgccgcacctgcgccaaccacgataccaatcgctaccatcgcgttgagataggtcggcgtagcgttatcggtaatgcccagcgccaccggtacccacagcaccaacaggaaacgcagcgtgacacccgctccccagaataaactggtgcccaccagcgaaaancgcgtttcaccattgcgccatagcgaggtgcaggcattcaggaaactgcgggtcatgttgatgagattccaggactgccccggacgcgccgccgccagtttgggaatgtagatattggcaacgaccgcaccaccgtaggccagtgcgcatgcggccagggcgaccaggacatgccagtcagccagcacaccaccggctacggaaccgagcaaaatcgccgctatggtagaagcttccattaaaccgttagcttttactaacttactacccgtggttaattcgccgagaataccgtatttcgccggtgaataggctgcagcaccaacacccaccagcgtatagccgagaaacggattgataccaaagcagatactggctgcgcccagcagcttcaggccgttggcaaacatcatcacccggcctttggcgaagctatccgccacctgcccgacaaacggcgcaaaaagaatgtaagcacctacaaacaccatttgcaggatgggctggctccactccggatagaactgcgctttcagtaacgccagagtggcaaacagtagggcattatcgccaaacgcagagagaaactgcgccacgataaccgctttcatccccttcgaccacaacgaagtgttagtgtgcactgactcactcatcgtgttgttccacttcgtctacccagcttttcaacgtgacaaagtcaggtttgccgctgccaagtaatggcatctgtttcaaatagcgaatatcacgcggtacagcaagctccggcacgccgtgctcacgggcatactgttgcaacttatcgcgcgtcagttcgttatctgtggtgaaaagcaccagtgcctcgcctttgctggcatcgctcttaatcgcagtggcatggactttatctggcgaaacaccaagtgccagttgttccaccatttccagcgacaccatttcgcctgcaattttggcaaagcgttttgcgcggccctgaatctgcacaaagccctgctcgtcaaaacgcacaatatcgccagtgtcataccagccgcgctccatttcgccgcgaacattctcggcggtgggcacttccagtacacctggcttctccacccgcagatagccgttcattatgttcggccctttcagttgcaggcgtccgccntcttcgataccagggaccgacaacaggcgcgcatccattcctggtagaatacgccctaccgtaccgggtttcgccgccatcggtacgttgatagaaacgacaggcgcgcattcggtcacaccgtagccttcaaggatgcgcaggccaaatttatcctgccaaagctgtttggtactttcttgtagtttttctgcgcctgccaccacatagcgtagacgatagaagtcatacgggttggcgaaacgcgcgtagtgaccgaggaaagtcgaagtgccgaacaacacggtgcaactgcggtcatacaccaactccggcacaatacggtaatgcagcgggcttggataaagaaacacttctgcacctgtgagcagtggcgtaaacaggcctaccgtcagcccaaaggagtgaaacagcggtaacgccgacataaagcgatcgttggtggtgaagtcggcaatcgttttaatctgctcgacattcgccagaatgcttttatggctatggacgacgccttttggatggccttcagaaccggaggtaaaaaggatcagcgcntcttcttccggctgctgtttaacctgtgccagacgcggcatcagcaaatgagcgaagatccatactttgtcggcagtggtgacatctgcttttaaatcttccagatagacccagcgcacctgagtaagttgctccggcagatgccagagtttgcctttatcgagaaactggcgggaagtgaagatggttttgatttcagccgccgtaatagcactggtcagcccttttaccccagcagtgtagttcatcattgcgggaatgcggcgacgggcgatgcccccaaaaatcactgccgcactgatgcctgcattgggcagcattaagccgatgcgttcgccttcaacactgtatttttcaaggatgcgtccaacaaacagcgttttcgtaagcaatttgcgataggagtctggggtaaaattgacgtcttcgacacatttcttccctgctccgaagcggtacattgcactcagtaaagattcgtacagcgtttcacgcgggcgcaccgccattcgcgcttccatcattatttgatgcagcatttcgccagcgattttgcgacggtcacgggcacgcggcgcatccggcatctccacctgcgttggtggcaaaatatgcagagtaatttgcgggaacaagcgacgtttaaccagacctttcaggcggctgaagtgcgtaagttccgccccttcaatacgcacaggaataaccgttgcaccagacttcgccgcgacaaaacccgcgccatcgtagattttcatcagcgagcctgtggtggtgatgcgtccttcagggaaaatcaccactggtcggccctgttccaccagacgtaccagatgtttaatcgccataggttgcgtcgggtcgagaggaacaaagtcgataaatgatttcagccaacgcatataccactgttggcttattgaggtgtaaacggcaaacactggacgcacaggtaaaaacagtccaagcaaaatgccatcaataaaagagacgtgattaggcgtaattagaacgcgctcgcccttcagtgcctgggggtcacccgtaacgcgaacgcgatacaaaacacggcacaaatttcgaaaaaagctaaaaagcattccaactccctttgctctgattcagtaaaagcgaatggagggagattacacgagataaagaacgcgagcgacagtaaattaggtgcgaaaaaaaacctgcgcatccgcgcaggttggtgcaagagacagggtacgaagagcgtaccgaataatctcaccaatcaatacctctgggatcttgattgtggtctgcacgacgactcttcgccagcgagaaaacgcaaaggaatgaagggaaatgcaacgaggtgtgtaaattgtcggttactgttacagattgatgaccggcaaaaaaaaacctgcgcatctgcgcaggctggtgtaattcatgtgctcaacccgaagttgacttcacctatcaatacctctgggatcaccactttagcaacctgaagccaaacgccaccagcggtcaatcgcaacagcgtttcgcaaagtgtaaccaaaggtttgcaatctctttttttgtcttacttatttgcgtttggctcacattcccacgatgaaaacacgccgccccttgaaccaacgggcgttttccgtaacactgaaacaatgtaagcgtttacccactaaggtattttcatggcgaccataaaggatgtagcccgactggcaggcgtttcagtcgccaccgtttcccgcgtcattaataattcacccaaagccagcgaagcttcccggctggctgtgcatagtgcaatggagtctcttagctatcacccgaacgccaacgcccgtgcgctggcgcagcagaccactgaaacggtcggtctggtcgttggtgatgtttccgatccgtttttcggtgcaatggtgaaagcggtcgaacaggtggcttatcacaccggtaatttcttattgattggcaatggttaccacaacgaacaaaaagagcgtcaggccattgagcaactgatccgccatcgctgtgctgcgttggtcgtccatgccaaaatgatcccggatgccgatttagcctcattattgaaacaaatgcccggtatggtgctgatcaaccgtatcctgcctggctttgaaaaccgttgtattgctctggacgatcgttacggtgcctggctggctacgcgtcatttaattcagcaaggtcatacccgcattggttatctgtgctctaaccactctatttctgacgccgaagatcgtctgcaagggtattacgatgcccttgctgaaagtggtattgcggccaatgaccggctggtgacatttggcgaaccagacgaaagcggcggcgaacaggcaatgaccgagcttttgggacgaggaagaaatttcactgcggtagcctgttataacgattcaatggcggcgggtgcgatgggcgttctcaatgataatggtattgatgtaccgggtgagatttcgttaattggctttgatgatgtgctggtgtcacgctatgtgcgtccgcgcctgaccaccgtgcgttacccaatcgtgacgatggcgacccaggctgccgaactggctttggcgctggcggataatcgccctctcccggaaatcactaatgtctttagtccgacgctggtacgtcgtcattcagtgtcaactccgtcgctggaggcaagtcatcatgcaaccagcgactaaccgcagttaaagcaattccagcgccagtaattcttcgatggtctggcgacggcgaatcaaccgcgcctgaccattatcaaacagaacttctggtaacagcggacggctattgtagttggatgacattgatgcgccatatgcccctgtatcatgcagtaccagataatcacctgccttcacttccggcaaggcgcgggtttcaacatttcccccttcctgctgggtaaagacatcgcccgattcacataacggtccggcgacgacggtttccaccgttggtgcgtgttccagagaacgaccatcagctgccagggcactgatatggtggtaactaccgtacattgccgggcgcatcagatcgttaaacccggcatcaaccagcacaaagtggcggctacccatttgtttgacgctccgcacctgagtaattaacacgccagactgcgctaccaggaagcgacccggttcaatttccagtttcacagggtggcccaaatggcgggcgatttgctcacgcgcggcattccacagaccataataatgttcggtatcaaccgcntcttcaccctgttgataaggaatagaaagcccaccgcccgcagaaatagcctgtaaatcctgaccgaattcgatgacctgacgcaccatagcaccacacacctgttccagatgggcataatcaacgccagaaccaatgtgcatgtgaatgccgaccagctgcagatgatgacgttgtatcacgtccagtgcggcgggcagatcggtgcaccagataccgtgcttgctgttttcgccaccggtattggttttttggctatgtccgtgaccaaaccccggattaacgcgcagccatacccgatgccctggcgaaacctggcccagttggtcgagcatatcaacagaacccgcattcaccggaatttgcaattcactgacgcgttcaagcgtcgcctgatcgataacatctgccgtaaaaacaatatcatcggggtgcgtttgcggattgtaacccgccgccaacgcacgctctatttcgcctaacgagacggaatccactttcacgccctgctcacgcattaagcgcaaaatatgaatattggaacaggctttctgtgcaaagcgcaccacatcaaactgtttcagcgctgcaatctgccgacgaataatttgcgcatcgtagacccacaccgggcagccaaattcagcgggcaaacgcagcagattttcggcggtgagatcggtatcggtgctgaacagtgaatgtggcataacaaactccagatgagtgcttttttatgattacgccacatcataaaaagaataaaaaatatcgatttatgtcgagtctatgcaaaaatgatatggattaccggattgcgagagagcgctaatggccgccgttaacttacgtcatattgaaatttttcatgcggtaatgaccgccggaagcctgactgaggcagcacacctgctacacacctcacagccaaccgtcagccgcgaactggcgcgctttgagaaggtgatcgggctgaaattgtttgagcgcgtacgtggacgattacatcctaccgtgcaaggactgcgtctgtttgaagaagtgcaacgatcctggtacggactggatcgcattgtcagcgccgcagaaagtctgcgcgagtttcgccagggagaactgtctattgcctgcctgccggtcttttcgcaatcttttttaccgcagctcctgcaaccctttctggtacgttatcccgatgtcagcttaaatatcgtgccccaggaatcaccgctacttgaagagtggctctcggcccagcgtcatgatttaggactcactgagacactccatacgcctgcaggaacagaacgtnccgaattactctctttagatgaattgtgtgtgttacctccgggtcatccgctggcggtaaaaaaggtattaacgccggatgattttcagggtgagaactacatcagcctttcccgtactgacagctatcgccagttgctggatcagctatttactgaacatcaggttaaacgacgcatgatcgtagaaacccacagcgccgcgtcagtctgcgcaatggtacgggcgggggtaggtgtttcggtggttaacccgctcaccgcactggattatgcggcaagcggtttagtggtgcggcggttcagtattgcggttccgttcaccgtcagcctgatccgccccctgcaccgcccgtcatcagcgctggtgcaggcgtttagtgagcatttacaagcggggttaccgaaactggtcacttctcttgacgctattttgtcgtcagctacgacagcataaaagcgacagcatcctcggcatggatcgccgcagtatcaaacacaggcaaaacactgcgctcttctggcaccagtaaaccaatttctgtgcagccaaaaatgacgccctgtgcgccctgttctgcaaggcgagcaatcacttgcgcataataagcgcgtgacgcttcggtnaattgccccagacacagttcttcaaaaataatctgattaattttcgcccgttcatccgcttcaggaataagacaattgatggaaaattgttccgtcagccgcccgcgataaaaatcctgttccatggtgtaacgcgtacccagcagcgccacacgagtcattccggccccggtaattgcacgtccggtggcatccgcaatgtgtaagaaaggcagagtgcaacgtgactcaatggcatccgccactttatgcatcgtattggtacataacacaataccttctgcgcccgcccgctgtaagccaagcgccgcctcagccagaatgtccccggttttatcccattccccgcgacgctggcactcttctatttcatgaaaatcgacgctatgtagcagcacttgcgcagagtgaagcccaccaagccgctgtttaatgccttcatttatcagacgatagtaaggaatggtggattcccagctcattcctcccagcaaaccaattgttttcattcctctctcctgatgtgtgttaccgcaacaaggctgaataaggaacgagacaaacgcctcaacggccaggtgcccgatctctattaacgaaaaaagggccggatgtacagcacatccggcccgtgaaatcagacgccgatatttctcaacttctcgcctgccatcagtttgcgttcgatatgttccagcgtgacatttttggtttccggaatgagccagaaagtgatgcccacaaacgcaatgttcagcgcagtgtagagccagaacgtaccggcagcgccaatgctatcaagcagtgtcaggaaggtcgcgccgataatcatattcgacacccagtttgtcgtcgtcgaacaggtaataccgaaatcgcggcatttcagcggctgaatttcagagcacaggatccacaccactggcgcggcgctcatcgcataaccggcaatacacatcatcgtcatgccaacagagagccaggacaagccactggaagccgtaccgttatcaaactgcatcaggcaatagcccagcaccagagtgcctaacgccatcacgctgaaaccaattttcagagccggtttacgacctgctttatctaccgtaaagaccgcaatgaaggtcgcgaacataaaggtcagtcccacgaccagagtcgcaatcatctgttgttctgtggtcgtaaagcccgccattttgaagatacgcggcgcatagtacatgatgatgttcataccggtaaactgctgcatcgcctgcaacaacataccgagaaacacagcacgacggacgttacggttgatcttaaacagtgcccaaccgccttgttttaacttcaggctttcacgaatttcgttgagttcttctcgcgctttttccgacgtatcgcgcagcatacgcaacacttcttccgcctcaatatgacgccccttttccgccagccagcgcgggctatttggcaggaagaccaccagaataatcagcaggactgctggtaaagcaagaacccccaacattgcgcgccagttaccgctataactgaacgctgtatcggataaaaacgccagcacgatgccgagtgtgaccatcaactggtacatactgatcatcttaccgcgaacgttttcacttgccatttcagaaagatacagaggagcggtgtaagacgcgatcccgacagcaatgcccagcaccacacgagcggcgattaacatctctacgctggtcgcaaaagcggaccctatagaaccgagtacaaacaggatggcccccgccatcaggctgtatttacgccccaggcggaacgacagccaaccattaaacagcgcaccaattgctgcgccgagcatcatgctactaaccacccattcctgcaaacgactggtcagcacaaagtgatcggtaatgaacggcaacgctccggcgattacgccgatatcaagaccaaataacaatcctgcgaccgcagcagctaccgaaacaaacatattcatacgccgcgtatcacgcaaagaacgtggcgttaaagcagattccgtattgatagtaaccattttttcctgccagcagagagtaagacatagtgaaaaaatacgtgaacaattcacacaggtgtcaggtcggaaacagcataaatatggattaaattgctgcgacatgccgttatgtgatggatattccaattttaaaattaagttgaattattgagattattattaaccacctaattttaaagcagataaaattcataaagttcattaattgataattgatatggattatttcataaccatgatatggattatgatgatctagagatataaaaaaccctgccatgcggcagggtcataaaagtaagaggaatgaattaacgcgccagccaaccgccatccacagcaatggtataaccatttacataatctgaagcgctggaggcaagaaacactaccggccccatcaggtcactcggcagtccccaacggccagctggaatgcggtcgagaatttccgcgctacgttgttcatctgcccgcagttgttgggtattgttggtcgccatgtaacccggagctatcgcattaacattaatgttgtgtttagcccattcattcgccatcaatcgcgtcacgcccatcacgccgctttttgatgcggtataagaaggcacacggatcccgccctggaaggagagcattgacgcgatattgataatcttgccgccattgccttgcgcgatgaagtgtttcgccgctgcctgagacatgaagaatacgctcttgatattcaggttcatgacatcgtcccagtccttttcgctgaactcgagagcatnttcgcggcgaatcaatccggcgttattcaccaggatatcaatatgaccaaantcagctaccgcgcgatccagcagtccaggaataccatcaatctttcgcagatcggcggtcaggcttaaaaaacgacgccccagcgccgtgacctgcttgatggtttcagtcggttcaacgatgttaatgccaacaatgtcacagcccgcttgcgccagccccaacgccatcccctggcccagcccagtatcacaaccagtgacgaccgcaactttaccttcgagagaaaatgcacttaaaatcataacaataccttattcgtttatgcccacaactagcgcaaatctttaacggccacatggtccatatcatcaaagacctggttttcaccgaccatgccccagataaaggtataagctttggttccgacgccggaatgaatcgaccagctcggggagatcaccgcctgctcgttatgcatcacaatgtgacgcgtttcttgcggctgccccatcatgtggaaaacgcaggcgtcatcatccatattgaaatagaaataaacttccatccggcgctcgtgggtgtgacacggcatggtgttccacaagttacccggagccagctccgtcagccccatactcaattggcaggtttccagcacatccgggacaaaatatttgttaatcgtgcgacggttactggtgaggttatcgcctaacgtgactggagatacttcgtccggtgtgacttttttggtaggatacgtcgtatgcgcgggtgcgcaattgtaataaaacttcgccggagtgccggtatcaatactagcaaagacaacttcttttgcgcctttacccacatacagggcgtcgcggtgaccgatttcatagcattgaccatcgacagtaatcgtaccggcaccgccaatattgataacacctaactcgcgacgttcaaggaaataacttacgccgagttgtttacccacttccccgccaacggaaaccgttttagttaccggcataatgccgccaataataatacggtcaatgtggctgtaaaccatggtgtactcatcggcgacaaataccttttcaaccaaaaattcattgcgcagcccctgggtttccagcgtttttgcgtgcgcactgtggatgctctgtcttacgtccacatcaacctccgataatcagtgaagcgtgaaaatagaaaacgatagtgaaacactgtttcgttttctctataaggggatgatatgcccatgggatcgggttttcaattaaaannnnannaatgtttcattttngagttaaggattaaaaaaagtgcagtgtcgatcacgaatctgtcatgagaatggaaaaatcagggagcccggaaaatgtatgtcgacttgccagccatcattattcaacagattaatgacggcagatatttatcggtaaggaggaaatgcagagctattcgtcacgttcaatggtcaatgccacaccctggcccccgccgatacaaagcgttgccagtcctttgcgggcattacgtttcaccatttcatgaaccagagaaaccaggattcggcaaccggaagcgcctatcgggtgaccgagtgcgatcgcgccaccattgacattgacccgacgctcatcccactcaagcatcttgccaaccgaaagcgcctgtgcagcaaacgcttcattagcctcgataagatcaacatcagccaactgccagcctacacgctccaggcaacggcgggtcgcatacaccggcgcaattcccatcaatgccggatctacaccaacgctggcaaatgcgcggatgcgggccagcacgggtaaattcaacgctcgtgctttggcttcgctcatcatcattaccgcagctgcgccatcgtttatggatgatgcattacccgctgtcacagaaccgagactatcaaatgaaggatttaaacgggctaaaccttctgcactggcgtcagtgtgtggctgttcatcggtatcaacaaccaacgtctgaccgttactttgggtcattaccgggacgatctcatctttaaatcgtccggcgtcaatcgccgctcgcgctttttgttgcgagctaagtgcgtaagcatcctgcaattgacggctgatgccatattcgcgagccagattttcggcggtgacaccaatatgataatcattgaaggcatcccataacccatcatgcacaagactgtcaaccagctggctattgccaagctgtgcaccggtgcggctatcagtcagaacatgtggtgcgcggctcatgttttcctggccaccggcgatgacaatatcagcctcgccacactgtatcgcctgagtagccagatgcagtgctttaagcccggaaccgcagacgtcattaatcgtgattgcagaaacgctattaggcagaccacctttaatagccgattgccttgccggattctgccctgcccctgcagtcaacacctgaccaagaattacttcatccaccgcatatgcaggaacgccggtacgttctattaacgctttcacgaccagactaccaagttccacggcggaatgacccgctaacgcaccgcgaaagcagccgataggtgtccgtaacgccccgacaatcacaacgtctttcatcacaacctcgcaccaattaacagtgcaatagtaaatgattgttaattacagttatcttaattgtttaaaaaaagtgatttttatcacaaaggaaatatacctgagcagtagtcagagtcataactggcacgtaaggtttgcaaccactaccccaccaatagaggggtagatagggcgttaatctcccatacttaacctggtttatggtaaattgccctccattttgtttaatttgtagatgatacgttcagataatgtctaatatttggtctaaagaagaaactctgtggagtttcgcgctctacggcacagccgttggtgcaggcacgctcttccttcctattcagttaggttcggcaggggctgtggtcctgtttattactgctctggtcgcctggcctttaacatactggccacataaagcnnnnngccagttcatcctctcatcgaaaacatcagcaggtgaagggataacgggcgcggtaacacactactatggcaagaagattggtaatctgattaccacgctgtacttcatcgccttttttgtcgtcgtgttgatatatgcagtggcaattaccaactcacttacggaacagctggcaaagcatatggttattgatcttcgcatccgtatgttggtgagtctgggtgttgtattaattctgaatctcatttttctgatgggacgtcatgccactattcgggtaatgggatttttggtattcccattgattgcctatttcttatttctttccatttaccttgtaggtagttggcaacctgatctattaacaacccaggtagagttcaatcagaatacccttcaccagatatggatatcgattcccgtgatggttttcgcctttagccatacgcccattatttctacgtttgccatagacagacgtgaaaaatatggcgaacacgctatggataaatgcaaaaaaattatgaaagtcgcttatctcatcatctgcataagtgtactgttctttgtctttagctgcctgctttctattccaccttcgtatattgaagcggctaaagaagaaggggtcaccattttatcggcgctttctatgctgccgaacgccccagcatggttgtcaatttccgggattattgtcgcagtagttgcgatgtcgaaatcattcctgggtacgtactttggcgttattgaaggtgccacggaggtcgtcaaaacaacactacagcaggttggtgtaaagaaaagtcgtgcatttaaccncgcactatcaattatgttggtatcgctgattaccttcattgtttgttgcattaacccgaacgcgatttcgatgatttatgcgatcagcggcccgctcattgccatgatacttttcatcatgcctacgctatcaacatatctcatcccggcgcttaaaccctggcgctccatcggaaatctgattacgctgatcgtgggtatcctgtgcgtatcggtaatgttctttagctaatatccattgtgaatggttcaaaattgctacaattntgaaccattccagttttcataatgtgcatttgttattattccgctctatcacttctctcgtcatatcctagtattatcagttagttaaacacacaaagagatctgaacatcttaaataagactatttaagatgcataacttagattcgcaagatatcttctggtcattcaaaaacaatttgcgatatagatattctcataccatgagatagttatctgaaccaccctcaaccaggtaagattaaatcagtgaaacataatcatatttaataacgagaaatgtattttaaaatgtcttaatcagaattatagcaaatacagattaatcgcaatttttcccagcaaaattacaaaatcatggtgtattgacatcatcaatcaccaatgaaattatgcaattatatacggatagggaggttcttaacatggggctttgtagtcgttataaaagtcttacatgcaatagttgctcaatgcattgccaaataatgccagaagagtcaccgcgtttgcagtactgcgcaaactcgtgtttttgtatgtggcccgaagaaagttcatattttaatcgtggtgtggtagaaggtatcttaacaaaaaaccacaatgcgagattaagcggatatatttttgtcgatttttcagtaagttttttacgtctattccttgaaaaagactggattgactatcttgcaagtactgacatggggattgttttagtcagcgaccgcaatatgcaatcgttagctaattactggcgaaaacacaactctgcaatatctgctgtcatatataatgatgatggtcttgatgttgccaatgaaaagatcagacaactatttattggtcgttatttatcatttaccagaggtaacacattaactcagatggaattcaccataatggggtatatggtttctggttataatccatatcagattgctgaagttctggatatggatatccgtagcatctacgcgtacaagcaacgaatcgaaaagagaatgggtggtaaaataaacgaattatttattcgttcacattcggtccaacattgatactcaacaatctgccagaatcatactctgtttatacgggcatttattgaaatgcccgtattttataaataggccgtcccctcaagagtaaacaccatagtatttaaaaccatcacacgaaaaattcagaagcattacgaaatatgaacttacaaacaatagtggcataaatgttancnnnnnnnnnnnnnnnnnnattttacgttgcgacattaaagcctcatttcaatcatcatgataaatannnnnnnnnnnnnnntttatgccgtaaataccaatatacttagcaaactatgtgatttccatttcgattgatttagtgtttattgacgtatgtactggattattaacgataatatcgagttctggcctgagcaccgaaaattaatatcggtacataacgccgatcttaacgtcgttctgacaacgccagccagtcgttgtttatcactgctacttgaagcttttcctgatgtggttgcacaacaagattttttcaccagagtctgggaagaagaaggtatgcgtgtgcctactaacacgttatatcagaacatatccattatcagacgcggatttcgcgctgttggtgatactacccactcgcttattgcaaccgtgccgagaagaggattcaagatccataatgacattaacatacaaaatcatgtaataaactcatcaacagacgcacatacacacaatgccccacctgccataaaagttaatgcgggatacaaagagagcattggtggcgcaaagaatttcaataacaaaatcctcaaacatataaaaagttatctaattatgttgagcgcatttgtcataggcgcatattctgcatattggctatggaataataatcaaccgaagccatttttcaaggattacaagactgttgcggaaattaatggctgccattttaatgtaacagaagatacaattgatgggttgaaagagttcgataaatataaaacacggatactggattcggggattaactgcaaaaaatatccgtggttatacttccctcttgcaaaatcctcaccggggatgattgttatggcatgcaataaaaactataaccaacatgaagtggcaggctgtttaaccctgtcttaccgtgaggttaatcgtggttgattataaaaaaaanttattatttattttagtttttatcagtgggtttattctcttcactgtctattcttacactgcagaaaaaatgatatataacgaaacatgcactgcaaattgggtaatttttaatgaccagggacgagcaaatcttaccatagactttatgtataacaaaaaaaataaaacaggaactgttgcgttgagtggaacctggcaacaaggtaacagagaaagtaaatcaatacggcgaaatattgaatacacatgggttgaaaactatgacacagcccatttaacatcaaagaaagttataagtttgagattatggatcaagtcgatgatgatagacttgcagaacttattcctgatttttatgtctttccagaaaaaagtgtaagctataatatactaaagcaaggtaagcatgcttttattttgagcattggtaacagagcaataatgcattgtgcaaggtaaactaaaatagataacaaaaagatggaacctcgttaatcataaaacaataaaattaaatattctcgcagtatatggcagtctaaagcatcaaagttttgatcaacatctttcattttagacatctccttacaatgtaaaatatcatgtatcaacaacatctggtgcaaatccatgagtcgaactcgacattcatcttagctcgattattattccttcgtacagtcgatgtaaacaatacagaaagaggattattaagaaccagtttactcagtgaatcaatagaggaaaggactaacgtttctttaaaagaattgatttcatcatctgttaaactaaactcatcattgacagatcgtgagatataactgtttttaactttactctttacgttgactttattgacagaattaacattcacaaatcttgaatttaatgcccatgatgttgtttgcgtgagaaccttctcagcattaaggaatttttttaacggaatccttggtttctttttcgagtccgaatttacaatatcatgcatatagaccatttcatgaatctgcgaaaactcaatgtccattatatacctcacatttttaccgtgactcgatgttactgttcaataatcaccttccatcaatactaaaattaatacccctaatgtgccgataacaaatatagtcattctacgtaacgtctccataaggtgataaccttgatcaaatgaatttcgaatataataaaggaaatcttttgagatgtttatcacgaataaagctatttatgttaccaatatcatttcgagtacgcacactatctatctgttttttaaggatataaaaaacaacatgtaagttatgtaaattgccgatgctactaagtaacattatagtaaaaaaagtaaaaatgagcgatttttgatagaataaagcatgagaaaaggtgatatttgacattatcagaagctgcgaattcggattttgctctaatcaaatgagagaaatgtaaaatgaagccacgaaatattaataatagcctaccactgcaaccattagttcctgaacaggagaacaaaaataagaaaaatgaagagaaatccgttaatccagataaaattacaatggggtctggtttaaattatattgaacaagaatctcttggagggaaatatctaacacatgatttgtcaataaagatagcggatatttctgaagagataattcagcaagcaatattatctgctatgagcatatataaatttccgataacagatgatttaatgagtatggctgtaaatgaactcataaaactgaccaaaatagagaataatgtagacctgaataaattcactactatatgcacagacgttctatcccccctcgtcaccaaacataataaacaaaaaagtcaaaacgacattctacccttcgcaaaaatccccttnnnnattttcattgaaaaaatggaaattgataatatgaatccaggtcatgtacattaaggcattttgaaatatcataattaggataactaataaggtgaatattagtataacagctgatgatgttattaatttgtagtggaaagtattttaactaataatgaagaaatatactcataagcaatgcaagcttaannnnnannnttnnnaaaagataaatataaaaatatcaatgagtcaatcaataataatttagcatcacgagacacatcacagaggaatattatggacacagaaacaattgaaatattcaataatagtgatgaatgggcaaatcaactaaaacacgcattatcgaaaggagaaaatctggcattactacatggtttgactcctgatatccttgatagaatatatgcatatgcattcgactaccatgaaaagggtaatgtaacggacgcagaaatttattataaattattgtgcatttatgcgttcgaaaatcatgaatatctaaaaggttttgcatcagtatgtcagtcaaaaaagaaatatcaacaagcatatgacctttacaagctaagttacaattactccccgtatgatgactattcagttatttatcgtatgggtcaatgtcaaattggggctaaaaatatcgataacgcaatgcaatgtttctatcatattattaacaattgtgaggatgctagtgttaagagtaaagcgcaggcatatattgaactcttaaccgataattcagaagataatggctaagcattacaatcatttggttaaaaatgctggttatagtgtanntaaccactatgaccagcacctcttatgctttcttaaatcaacatcttaaaacagttaagaacacactaaaaaatattatnnnncaacgcgttagagaacaatctattttatcaaaattgaataaggctatttcagattacatcagtgaattcctaagataaattagtgaacacaaccatagatatgtcgaatgtaaactcctgtagcgttaatgacacataaatatgaatagccataatttctattgcttatgcaggatgcaagaaaccaattttttcatagaggttaactaatggacttagaaaataaattctcatatcattttcttgagggattaacgctcacggaagatggaattcttactcaaggaaatgagcaagtttatattccaccgaaagagttaggtgtattaatagtattacttgaatccgctggtcatgtcgtactgaaagatatgatcatcgaatcagtatggaaaaatattattgttagtgatgagtccctgacaagatgtatctattctttgcgctgcatttytgaaaaaattggctatgatcgttgctnnnngccagctcgcataaatttcgcatacttcacccacagaaacgtcgtcaagttctgcttcaatcagagagccgtttatgctatgtaagtagctgtatttatttaataattttaattttttcataccagcatgctccatatcgcaagacattatcctaaatagttttcagaatattaacgggaacattttccgttagttccccgtacgaaagtacttcgaggtctcgataactagattcaataagttttttgataaaacgacgaatatccacagatcccagtaaaataatgtctttaataggaatattgattccagaaagtgccagtttaaaattatccagaatcatctcagcttcggatgcatcgagattaagaaaagtaccgccagcggtaggcctgacaccatctctgattctgtcctctatttcaggcgaaatcacaattgctttaatttctccagaatatgaaaacttatggcaaatgtagcgacctaatgtacctcgtacatgctcgacgagtgtgattatatctttctctcgtgggctccataatgctaaggcctccataactaaccgcatattgcgcactgaaattcgctcctggatcagacgctgaattacctctgaaatgcgctgcacggttatatatcttaatatttcttttaatagatcagaatacttcatctctaattgatcaagaatatattttgtttcttgtacaccaaagtactcattaatattatgagccagacagacagataaatgattatacatttcatccatggccgtgcgagtataacagccaatttttgttaatttttgagcatcacttttcgtaacccaataatattgttcaccattactatttacaatgacaggtttcttgatcaaagtcgaaaccacttcatctgaatattcaaccaacaagacaagatcatgataaattttaaattgtgaagctctgacttcatttagcattaatatgacatcttcatcattaagaccttccccctcacgaatgacaataccgggaatgcggataccatactcaataaaaaactgactacgaatcctatcagcaagattgatttcagtgtattttttagcctgtacactattcataatcaagaccaagggtaccgtttcggtaataacctgatcaagtttattaatgatacctaatgagatatcatcatcttgattatagggttccaacccaacggtaatatctccctcaacaaccgtttcttcagtccctttctttttgaatttaaagtaaaagtaaattcctaagattactgccaaacataaaaacactagaaggggaaaacctggaagcaacccaatacttagcgcgaggacacatgtcacaacaatgacaaaagaattacttaataactgggacattatattttgccccatattatcactatcgccatttacgcgcgtaacgataaatcctgcgctaatagcaattaataaagctggaatttgagaaacaagaccatcaccgacagtaagaattgtgtagacagtcaacgctgttgagaaatccattccattttggcctactcctactgatagcccaccgataatattaacaaagataataataatgtttgcaatagcatcacctttgataaatttcatcgcaccatcaaaggaaccatacaactggctctctcgttctaatacactacgacgttcttttgctaaatctgcatcaatgatcccggcgcgtagatcggcgtcaatgctcatttgtttacctggcataccgtcaagcgaaaagcgggcagcaacttcagccacacgttccgaacctttagtaatcacgataaactgaacaatagtaacaatggagaaaataacaaaaccaactaccaggctatctccaataacgaactcaccaaaactcgttataatttctccagcatccgcctcaagaagtataagtcgactggtactgatcgccagcgccaaacgaaataacgttgtgataaggaggattgatggaaatgaagaaaagcttaagatcctatcaacatagaatgatcctaaaaatacaagtattgccaatgttaagttaagcccaatcaaaaagtcgattaaataggtgggcaatggaattatgagcatggcgataatcatcaccattaatccaagaattattaattctggatgactccttaaccctaccaaaactttgttaaacattgaacatcaccttcttccatggttttttattttgnnnnntgttacagttttgtgtatcaaagagctctgctgcaaatgttacttttattgcctgtttacaacactccctaatctctaataattgttcannnnnnnnnaaaagtgaaaatggaagatttgtacatccactgtaaatcgccttcaggagtaacgttttgtctttataattagcatctgcgggaagggtcaccagtgcattgttcaggagttcctctgcagtctcaggaaattttattaacgatatcagaaaaaanatccagtaatcttctgcgctgataaattttttaattattgggttattcattaaatttttcagaaataaagcctctgccgactgaagagacaatagttgtgacaacttattgagaaacataccaaattccaatgatgaacaactcgcatcaagtgcatttatatctgagaaaagcgtctctntgataaattttgtcaccaacattctattttgatagccataactaccaatccattcgacataagtatctacagcatcgtcttctgccattaaaaattgccgataactcgcccttagtaattttggatttaatgacagcgcctggccaaataactttgcttttaatgccgagttaattccgctattaatgaattttttagtagtctcttgattaacttttctaagtaatgcttcagcgtttagccggacattttctgatatttgttttttacgtaaaattgcacgtaacacaactaccagatcgctttcatctgggaataattttttagcaaagctatacacttcatagtcatgggtagttgcagccttaagcgcctccataactttgtcggttttttctattggctggtcttccaggacatattcttctccgtccagaaaattggccagttgttcttcgtaaatttttttcttcataaactgcgttaacgctgctgacatctcgtcagtagcttgtaagaaccgagcttctttacctgcgggatcatcccccattttaggcatttcagcttcaatgtcttcattatcttctgtgataatgtcctctaagcgagaaacttccctggctctttctaatacaccgacatgctctacatgaatcgccatttcactatcctccgacgacttcacgattcagataagtttttatccatttctgcagtaattcatcgttgatttctttattttttgccatttgctgtgtaatcgctctggcatcaaccgcagcctcattcgcattattcatcatgcgttcatcgatctctcttggctcaataagaaagacacgaacgatgttattcgcatttgttccttcataaccaaataatttaccaataaatggaatgctgcctaatattgggatcttgcgactttcataggtattcgtatcgcgtgtatatcccccaatcaaaagacttttcccttggggcacnngtgcaatagtacttataagtgtnctaccaacctgaggcagatcatcaacattggtcttgtcggaattgatttcatttccatcttcaatattcaagagtaattcaatttgatttcgcgcagcaaatcgtggtagcacgctaatcatcgtaccataggttacttcatccaattccgcagtacgctcgccgactaatttagtatagaaagtgcggttattatcaaatatagcaggaatattctcttgtgttaaaacgacgggacgagcaacaacggcggctcttcttttttgtgcaagtgcctgtattgttgcaataaactgtgtcccatcaagggtactaattgaacctgaattattaaatgatgcacttaagctggatccaatttttatcgtgcccgaccagtcagcacctagctgttctagatcagtcttatcaatatctattatccataaagataattcaatgtgtcgctttggaatatcaagcgtagctactaacttctcgataaaatcaacctgagatactgttcctttaacaagtaaactgttggtatcaggatatgcaataatttgtatatcgtcagtctctggcgctcctgctgtcgatattattttctctacttgtaggtcatcatcttcttcagccccaggaaaaggaggcatacgtgatacgttttttagttgttgacgacttgaaatttcagaaagtacgttcacccctgtgctttgcttaatgttnttatttaacaacgtcgatagtacttttgccatgccaggaataactatcttttcgccacgtaactcataagtccggtcattaacgaatgtgttgaccagatgaattattcctactttatttcgaccgatctcaatgccatcgctgttttgctccattaatttcgcagcattaacgaccaggtcaacataaaccggtggccccgatacatagaaagtaccattgccgtcccctttaatttcataacgagagttatacagacccgatttttttaagaaattattaaactcattcgtcgatacctttctcagattaatcaatgcattacgcatctctgatgagtcatagatataaatagctntgccatcatcataccaaataagccccatctgtgccgacaggcgttcaatcaaggcatagggttctgttaaatcaaaatttccgctgatctgtttcttcatggcaagcttactaactattgtaggcttacccgcatatgatgaaaccgtnnnnnnnaaactacgtagattttctttatttgctacgtatccattctctgctgcggcatatgcaccaggagtcaataatccattaaaaatgcataagactgaaattaatataatagtaatgcgtaattttattttcataactttttacatagttctctcggtgtttttcctaaccggctttttacttcggctgaaaagtgtgatgaggacgagtaaccatatttatgcgcaatagttgtcatatcactgtttccttcaatgatttccaacacggctctggcaactctccagccacataattccgttttaactttaccacccaatgcataactacataaacggcgaaaatgtgaatacgatacgccgtaaagctcaccaagatcatagagtgaagtctgtatgagcgattgcgataataaataacgaaccagtttatagcattctgtttttcttagatgctgaaacaggatttcattaatattatcgctgctcagataagtggctaaaaaccaggcttcacttgcaactttactgaatagcacaacttctgatgcaaagggcaaggcatcagcaaacaattcatggtgttccctttccacactccccgttgattcatctataaaagctaataatttactcaggatatcaatgcgaagtggatgataaattactttccctgcagttacctcaatttggcttcggtcaatgagcagtaatatatcttccactaccattaatttttgatggttattaccaatcgtaataacaagggttacatccttgttttcatttccccgtaagaaccacatttcagggtccagtagggttaacttctgtccttgaagcaaaacattcattggaagtaacagcccttcttcaatcatgtttcatctccttattccatattctcattctccataaacttgctataaaaacatgattaaaaagtgatgattactatttataaaataatgattttgttatgagcgaatagctatcagccacttacactagtacgtcatcctgtccatatacagatttgtaactgttgatatgttttacttaaacacacctcgtattacttataacacttgtttggtaactattttcaatacaaatcatatttgttagttcttcattaacacactgcgagtgttttgttactccccgcatatattttattctcttgttcgattctatttttcttaatcgatcatataattttcttgttagtcggatttacgaatcatgagacttataatggaaggaatgagactaagcggccaggttaaacctgtaattattgcagcaaacaaccgatatgttactttttcttccgagaagataaatattaaagttgatgtcacaaccagacctatcaggtaagctaacagtaatttattgatcacttttacctcccctttcgatttctctttgagcggtccttttaatccaggaccgcctcattatgaaaattatttaattccctcatcattgataaggttggacatctctttcaacatgagagtcattgaagctttcgaccaatttagcggaatgatagggcttggcgcttcatgcaaagttcccgacttgtggatatagttatagctttcgggaagtgccatttctggtacgctcctgccatttgcaccaatcatattctcgcctgttatttgggccaatgatctattcataaattgtactgagtcattcaaatactcttcttttcttgattctttataaacaattgctgctgattttgcataccatgagtcaaaaaaccattctgcttctgttgatggaatgaagctcttttctctttttgcatgcgaattttgatcggtatcggttttaatatcattgaaccaaaaatttgccgactgataattatccttctcgtatctttttataccatacggacctgctagttttttaactatttttagaacttgctcttttcttctggtgtttatctttgaaagatttgcaggataaataacattaagtaaagccgcatcggcttctctgtaatgtttatctttttccagataacctggggattctccccctaaatcaagctgtaacgttattctttcataacctttatctatgaggtggttcaacctcgttgttgaaagagtttcatccagttcattgactttagcttcgcgtagtaaatcagagacaaaaacagagtctttcttcgagagtaggtttgacaaacgttccagtccagaggtcaccagtgcaacggaagatgtgtttaatcgggcatcttcctcccacgctccggaatcttccataacatagaaattggctttatccagataagcaatcagcagcgcaaccgattttagtcggtcacctttttgccaatcttcagcgttaatagtaccagtattgattgcttgtataaggagatcaagataaagacctaacgcatcattttgtttatggttccacagctgcggcttgccttcttcctgcacatctgccatcacgggggagttgctgtcaaatatncacagcattcatttgcccgggaataccatccagtcgttttgggttgctaatgatgtcctgcatccgcttaatctggtcgggcgtagacatataatcccacagggtgagcagaaccttttttgcggctacactatttccctggtctgatactaatgccatatagccccataaactatccctcagccagacagcatcatagtgggtttctgccgctgttttgtcatcttcgaaagtagaagcaagaataaacgttccccagggtttctccgtcaacgttaactttcgtgtgttttctgttaatgttagcaatccttgaatttcgtctttggtatagtggctctttatttcattttgtaatttggctgagtgaatcagaagacgataattaggatacttatctggatttaacgataaataacttttatctgttgctgcccccgtggaattaagaatgttaaatacagatttactcgtcacttctgcccctgtcgcctggcatgtgccgcacgaaaatataccagcgagcagaagagttaatgcagatttccctttcataaaatattccatcaatcgtttgttaaaagcgtagataaccacttatttaacaacttgaaaataaggtattttacctgggttgttacaaaaggattgcattgcgtaaacgctttttatttacaaaaaaatgggggagtgttacagagattgcgaaaagtctgaagcgattgaattaagataatatagaaaatcagatacagcaaaaatggcagattgatgaggtgaagataaattggagcgggcgaagggaatcgaaccctcgtatagagcttgggaagctctcgttctaccattgaactacgcccgcttcgagatgcgtaaggcattataaaccttacgctcttcttagcaagtgccgcgctgctgactgctgattaattcgccatcagcattttggcttgctgccctgaggcggcaagtaacgtagcggatcaattgccgttgcacggtaacgaatctggaaatgcaggcgaacagatgccgcatccgtgctccccatggtggcgattttttgcccagccttcnnnnntttgcccattatttaccagcatcgtgtcattatgggcgtaagccgtaatgtaatcttcactgtgtttaatcatgatgagattaccgtagccacgcagctggttgcccacatacaccacctttcctgcacccgcggcgtaaataggtgtaccccgtggagctgagatatcaatccctttattgccgccatctgctgtcgaatacggcatgataactttccctgtcgttggccataaccaacaacgttgccctactggcggccaggaagatttcggtaccgctgatgacggtgtaaccgatgcggttttggtcgttgatttggcggttgatttacgtgtactactgctacttttcgccccacccagttttagtttctgaccaacttcaatggtgtaagggggggaaatgccgttcagtcgcgccagctcttttacgctggttcccgtggtgcgcgaaatacgatatagcgtatccccccgtttcacggtgtaaacggagccggaatacgttcctgtatcggatgatttgctacccgaacagcccgccaaaagcagtccaaccgataacaacatcacgatacccagagattttttattcaggcgtcccgcactcaaaatctttcctcgcttaaaaaacaagacgccatatcatagcagccagcctcttgatacccaatctcttgcttctggaaaaacgatgtaatagagaaagaggttaatttcatttggcaaagggaagtatcatcagcaaaatattcactgtagaggtatcgaagttcctgacttttttaccctatttcccatcctgatgcgtaataatcctaatttatcacattgattttatcgccactcatattgatacgtatcactacccctattcagggtcctgtttcgtatcatatctgtgtttttttaacatcatcacacttccttcctcccttaacgcttatcgtcgtttctggcgtaaatcttgcctgcttagactaaatctttgccataagaaccaaatgttcaaatcgaggggatttctatggaagcgcgggaagcaaccgctacgggtgaatcatgcatgcgcgttgatgccattgctaaggtcaccgggcgggcacgatatactgacgattatgttatggcgggcatgtgttatgcgaaatatgtacgtagccctatcgcacatggttatgccgtaagtattaatgatgaacaagccagaagtttaccaggcgtactggcgatttttacctgggaagatgtgcctgatatcccattcgctacagctgggcatgcatggacacttgacgaaaacaagcgcgataccgccgatcgcgcactgctaactcgccatgttcgtcatcatggtgacgccgttgccatcgtcgtggcccgcgatgaactcacggcagaaaaagcggcgcaattggtcagcattgagtggcaagaattacccgttatcaccacgccagaagcggcgctggcagaggacgctgcaccaatccataacggcggcaatttactgaaacaaagcacgatgtcgacgggcaatgtccaacaaacactcgatgccgccgactaccaggtacaggggcactatcagacccccgttattcaacattgtcacatggaaagcgtaacatcgctggcgtggatggaggatgactcgcgaattaccatcgtttccagcacccagatcccgcacattgttcgccgcgtggttggtcaggcgctggatattccctggtcatgcgtacgagtcatcaaaccatttgtcggtggcggttttggtaataaacaggatgtactggaagagccaatggcggcattcctgaccagcaagcttggcggcattccggtgaaagtttcccttagccgtgaagagtgtttcctcgcaacccgtacccgccacgcttttactattgacgggcaaatgggcgtgaaccgcgacggaacattgaaaggttatagtctggatgttctgtctaacaccggcgcttatgtatctcacgggcactccatcgcttctgcagggggaaataaagtcgcttacctttatcctcgttgtgcctacgcttacagttcaaagacctgctataccaacctcccctcggctggtgcgatgcgtggttatggcgcgccacaagtcgtatttgccgttgagtctatgcttgatgacgccgcgacagtgttaggtattgatcctgttgaaattcgtttacgcaacgccgcacgcgaaggagatgctaatccgctcacgggcaaacgtatttacagcgcagggttgccggagtgtcttgaaaaaggccggaaaatctttgaatgggaaaaacgccgtgcagagtgccagaaccagcaaggcaatttacgccgnnnngttggcgtcgcctgttttagctacacctctaacacctggcctgtcggcgtagaaatagcaggcgcgcgccttctgatgaatcaggatggaaccatcaacgtgcaaagcggcgcgacggaaatcggtcagggtgccgacaccgtcttctcgcaaatggtggcagaaaccgtgggggttccggtcagcgacgttcgcgttatttcaacacaagataccgacgttacgccgttcgatcccggcgcatttgcctcacgccagagctatgttgccgcgcctgcgctgcgcagtnnngcactgttattaaaagagaaaatcatcgctcacgccgcagtcatgctacatcagtcagcgatgaatctgaccctgataaaaggccatatcgtgctggttgaacgaccggaagagccgttaatgtcgttaaaagatttggcgatggacgctttctaccaccctgaacgcggcgggcagctntctgctgaaagctccatcaaaaccaccactaacccaccggcgttcggctgtacctttgttgatctgacggtcgatattgcgctgtgcaaagtcaccatcaaccgcatcctcaacgttcatgattcgggccatattcttaatccgctactggcagaaggtcaggtacacggcggaatgggaatgggcattggctgggcgctatttgaagagatgatcatcgatgcgaaaagcggcgtggtccgtaaccccaatctgctggattacaaaatgccgaccatgccggatctgccacaactggaaagcgcgttcgtcgaaatcaatgagccgcaatccgcatacggacataagtcactgggtgagccaccaataattcctgttgccgctgctattcgtaacgcggtgaagatggctaccggtgttgcaatcaatacactgccgctgacgccaaaacggttatatgaagagttccatctggcaggattgatttgaggataacatcatgtttgattttgcttcttaccatcgcgcagcaacccttgccgatgccatcaacctgctggctgacaacccgcaggccaaactgctcgccggtggcactgacgtactgattcagctccaccatcacaatgaccgttatcgccatattgttgatattcataatctggcggagctgcggggaattacgctggcggaagatggctcgctacgtatcggctctgcaacgacatttacccagntaatagaagattctataactcaacgtcatctcccggcgttatgtgctgcggcctcgtctattgctggaccgcagatccgtaacgtcgctacctacggtggaaatatttgcaacggtgccaccagcgcagattctgccacgccaacgctcatttatgacgcgaaactggagatccactccccacgcggtgttcgtttcgtcccgattaatggctttcacaccgggccgggcaaagtgtctcttgagcatgacgaaatccttgtcgcctttcattttccgccccagccgaaagaacacgtgggcagcgcgcattttaaatatgccatgcgcgacgcaatggatatttcaacgattggctgtgccgcacattgccgactggataacggcaatttcagcgaattacgcctggcatttggtgttgccgcgccaacgccgattcgctgccaacatgccgaacagactgcacaaaatgcgccattaaacctgcaaacgctggaagctatcagcgaatctgtcctgcaagatgtcgccccgcgttcttcatggcgggccagtaaagagtttcgtctgcatctcatccagacgatgaccaaaaaagtgattagcgaagccgtcgccnnnnnggggggaaaattgcaatgaatcacagcgaaacaattaccatcgaatgcaccattaacgggatgccttttcagcttcatgccgcaccaggcacgccgctntcggaattactccgcgaacaaggactgctaagtgtcaaacaagggtgctgcgtgggtgaatgtggtgcctgtacggtgctggtcgacggcacagcaatagacagttgcttataccttgccgcctgggctgaaggaaaagagatccgcacgctggaaggtgaagcgaaaggcggaaaactttctcatgttcagcaggcttatgcgaaatccggcgcagtgcagtgcgggttttgtacgcctggcctgattatggctaccacggcaatgctggcgaaaccacgcgagaagccattaaccattacggaaattcgtcgcggactggcgggaaatctttgtcgctgcacggggtatcagatgattgtaaatacagttctggattgcgagaaaacgaagtaaaaggatatccggcctgaattcaggccggattcactgatgttatgtgtttaacaactcatatttcttaatcttgcgatagagcgtagcaatgccgatgcccagttcatcagcaacttgcttcttgctgttatgacgtgaaagcgcctcgcggatcatttgcttttccatctcctccagcgccgtgccgcccgcatcatcgagtgacaggtgtgcctcagtaacctctgttacatcactttgctccgttgtgccattattcagcagatttggcggcaatagcgtgctgtcgataacttcacctgaaggaacaacgttaaccagatattccatcaaattgcttaactcgcgcaggtttccgggccaacgatgcttacgcaatatttcgacgacatcgggagcaatgccaggataaaccgatcccagacgacgggtatgcagatgtaaaaagtaatgcaccagtagttcaatatcttcctgacgttcacgcagcggtggcagagttatcgggataacattaagtcggtagaagagatcttcgcggaatttaccttcggcaatgaactgggccaaattctggttagttgcagaaatgatgcgaatgtcgacttgtattgggctactggcaccaatcggcagaatttcacgtgcctcaatagcgcgcagtaatttagcctgcaacattaatggcatatcacctatttcatcgagaaacagcgtgcccgtattcgccgcctgaatcaaccctgttttaccgttggcagaagcgccagtaaatgcgcctttaacataaccgaacagttcgctctccagaagctgctccggaatcgcggcacagttgatagcaataaagggtttattccgtcttccgctcaacttatggattgcacgggcgacaacttctttacccgtgccgctttcaccaaccaccataacgctggatgggctgggtgcaatacggctaatgagtcgttttaattgccgcataacacggcactcgccaaccaattgttcaatatgcggttcatcaggtgcatttgctacagaaaaactggtatgcgattggtgaaacgccattaaaaataattgtcggccctgaatgttatgcaattgaccaatgattaattcacttttatcgtcccacgaaacaatatgctgcatatgtccatgggtaaaattactctcaaatgttaatggtctgaaacggataggtttcccaataatattnttttgcacaacaccaagtgtttttaaggcagtctgattaacaaactgaacccgactttcatcatcaacaactaatacgccctgatccatattatcgatcatggtcgcgaatattttactgatgttatctcctggcccctgatcctccagaagtttnnaaacaaaaatggtggatatatggcgaacataatcagaaaattcgcgtaaattatcactgatatgctcttgttgctcgtgggtaacggcaatcaaacttatcaccccaacacaacgatcctgtaaaatgacaggcgtacccagaaatgctttttcgcggcaattttctttactatcgcaaccttcgcaaaggggatcgaagcgagactgtgtcacaactttttcagttttcgtttccaggacgtggcggagcaggcgtgagttgccgctcaactggcgaccaagaaacttcccatacgcgcccgttccggcgacgcgacacaagttttcatcaacgatctcaacctcaagctgcaaaacgctggcaagcattctggcaaaacgctgaattgtcggttgaatttgcatcaatactgactgcgtagtagcaagctccatagctttaccttccagacttacttaaaagtcgatcattgaagacgttgatggttcacagatcatgatcatattaactcaggcgaaattggctttgataaaaacataagatttttatcactttctaatgaaattatggaagagatatcacatttctatatcaatatgagaattacggcggtgagtttatcaaactgacgagggatagcctgtccctttatcttatttctgatacttagcagcaaataaataacgcgataaaaaaagccaaacgttttcgtattttacaaacaaccggaagctggcatcaatttgtgatcaaccccacacattatccgtcaaattagtcttttgcagccccgtggataattctggcacacttattgttagtcccaggtatagctgtgaaaacaccaatcactttggcaagtcacagtgaaataaaccactttgcctgtcattccactaccgggactttatgatgaaaactgttaatgagctgattaaggatatcaattcgctgacctctcaccttcacgagaaagattttttgttaacgtgggaacagactccagatgaactgaaacaagtactggacgttgccgcagcattaaaagcactgcgtgctgaaaacatctcaaccaaagtctttaatagtggattaggtatttccgtattccgcgacaactccactcgtacccgcttctcttatgcttccgcgcttaacctgctcggccttgcacagcaagatctcgatgaaggcaaatcacaaatcgctcacggcgaaaccgtgcgtgaaaccgccnatatgatctccttctgcgccgacgctattggtattcgcgacgatatgtatctgggcgcaggcaacgcctatatgcgtgaagttggcgctgcacttgatgacggttacaagcagggtgtactgccacagcgtccggctttagtgaacctgcaatgcgatattgaccacccgactcagtcaatggctgacctggcatggttacgtgaacactttggttcactggaaaacctgaaaggtaaaaaaatcgccatgacctgggcctactctccaagctatggcaaaccgctctctgtaccacaaggcatcatcggtctgatgactcgcttcggtatggatgtcaccctggcccatccggaaggctacgacctgatcccggatgtagtagaagtcgcgaaaaacaatgctaaagcatctggcggtagcttccgtcaggtcaccagcatggaagaagcgttcaaagatgcagacatcgtttatccgaagtcatgggcaccttacaaagtgatggaacagcgtaccgaattgctgcgcgctaacgatcacgaaggcttaaaagcactggaaaaacagtgtctggcacagaacgcgcaacacaaagactggcattgtactgaagagatgatggaactgacccgtgatggcgaagccctgtacatgcactgcctgccagctgatatcagcggcgtatcctgcaaagaaggggaagtgactgaaggcgtattcgaaaaataccgtatcgctacctacaaagaagccagctggaagccttatatcatcgccgcgatgatcctgtcccgtaaatacgccaaaccaggtgcactgctcgagcaactgctgaaagaagcgcaagaacgcgtgaaataacccctcgggccgatcagctggtcggccctctatttccagaggccaaaaggataggatatgtccgttttctcattgaagattgatatcgccgataacaaatttttcaacggcgaaacatcaccgctcttttcgcaaagccaggccaaactggcgcgccagttccaccagaaaatagctggttatcgcccaacaccgctttgtgcgctggacgatctcgcaaacctttttggggtgaagaaaattcttgtcaaagacgaatcaaaacgattcggtctgaacgccttcaaaatgctcggcggtgcgtacgctatcgctcaattattgtgtgaaaaatatcatcttgatatcgaaacgctgtcatttgagcacctgaaaaatgccatcggcgaaaaaatgactttcgcgaccaccaccgacggcaaccacgggcgcggtgtggcgtgggcagcgcagcaactcggacagaatgcggtgatttacatgccgaaaggttctgctcaggaacgcgttgacgccattctgaacctcggtgccgagtgcatcgtcacagatatgaactatgacgataccgttcgcctgaccatgcaacacgcgcagcagcacggctgggaagtggtacaggacacggcatgggaaggttacaccaaaatcccaacctggatcatgcaaggctacgcaaccctggcagatgaagccgtcgagcaaatgcgtgaaatgggcgtaaccccgacgcacgttctgctgcaagccggtgtcggagcaatggccggtggtgtgctgggttatctggtcgacgtctatagcccgcaaaatntgcacagcattattgttgaacctgacaaagctgactgtatttatcgctccggcgtcaaaggcgacatcgtcaacgttggcggtgatatggccaccatcatggcaggcctggcctgtggcgaacctaacccgctgggctgggaaatcctacgtaactgcgccacccaattcatctcctgccaggacagcgttgccgcattaggtatgcgcgtgctgggtaatccgtacggcaacgacccgcgcatcatctccggtgaatccggcgctgtcggtttgggcgttctcgcagcggttcattatcacccgcaacgtcaaagcctgatggaaaaactggcgctgaacaaagatgccgtagtgctggttatcagcactgaaggcgacaccgacgtgaagcactaccgcgaagttgtctgggaaggcaaacacgctgtagcaccttaatcaccctattggaactgctccctgcaaaacggggagtaaaaaatctggagaaaaataatggctaagaatattccattcaaactgattcttgaaaaagcaaaagattaccaggcggatatgactcgcttcctgcgcgacatggttgctattcccagtgaaagctgcgacgagaaacgggtagtacatcgtattaaagaagagatggaaaaagtcggcttcgataaagttgaaatcgacccgatgggtaacgttctcggttatatcggccacggcccgcgtctggtggcaatggacgctcatatcgataccgtcggcattggcaacatcaaaaactgggacttcgatccgtacgaaggcatggaaactgatgagctgatcggtggtcgcggtacttccgaccaggaaggcggcatggcatctatggtttatgccggtaaaatcattaaagacctcggtctggaagatgaatataccctgctggttaccggtactgtgcaggaagaagactgcgacggtctgtgctggcagtacattattgaacaatccggcattcgcccggaatttgtggtcagtaccgaaccaaccgactgccaggtataccgtggtcagcgcggtcgtatggaaattcgtattgatgttcagggtgttagctgccacggttctgcgccagaacgcggtgacaacgccattttcaaaatgggtccgattcttggcgaattacaagaactctcccaacgtctgggttatgacgaattcctcggcaaaggcaccctcaccgtttctgaaatcttcttcacatccccaagccgttgcgctgtagcagatagctgcgccgtctctattgaccgccgtctgacctggggcgaaacctgggaaggcgcgctggacgaaatccgcgccctgcctgcagtacagaaagctaacgcggttgtttctatgtacaactacgaccgtccgtcctggactggcctggtttacccaaccgaatgctacttcccgacctggaaagtggaagaagatcacttcaccgttaaagcactggtgaatgcctacgaagggctgtttggcaaagcgccggttgttgataagtggaccttctcaactaacggcgtatctatcatgggccgtcacggcattccggtgatcggctttggcccgggtaaagaacctgaagcgcatgcacctaacgaaaaaacctggaaatctcacctggtgacctgtgccgcgatgtacgctgcaatcccgttaagctggctggcaaccgaataattactcttcacttattcccctccggttcgccggagggtttttggagtttgctatgcgcgtattgatcaaaaacggcactgtcgttaacgcagatggacaagccaaacaggatttgctgattgaaagcgggattgttcgccagttgggcaacaatatttcgccgcagctcccgtatgaagaaattgatgccactggctgttacgttttccctggcggcgtggatgtccatacgcatttcaatattgatgtcggcatcgcgcgcagttgtgatgatttttttaccggtacccnnnnagctgcgtgtggcggtacaacaaccattattgaccatatgggatttggcccaaacggctgtcggttacgccatcaactggaggtttatcgtggttatgccgcccataaagcggtcatcgattacagctttcacggtgtgatccagcacattaatcacgccatcctcgacgaaatcccgatgatggtcgaggaagggctgagcagttttaaactctatttaacctatcaatacaaactcaacgatgacgaggttttgcaggcattacgccgtctgcatgaatccggcgcgctgaccaccgtgcacccggaaaatgatgcggctatcgccagcaagcgggcggaatttatcgccgcagggttaaccgcgccgcgctatcatgccttgagtcgccctctggaatgcgaagcggaagccatcgcccgcatgattaacctggcacaaattgccggtaacgccccgctctatatcgtgcacctgtctaacggcttaggtctggattatctgcgtcttgcccgtgcgaatcaccagccagtctgggttgaaacctgcccacaatatctcctgttggacgaacgcagttacgatacagaagacggcatgaagttcattcttagcccaccgctgcgtaacgtacgcgagcaggacaaactgtggtgtggcatcagcgatggtgcgattgacgtggtggcgaccgatcactgcaccttctcgatggctcaacgcctgcaaatttctaaaggcgatttcagtcgctgcccaaatggcttacccggtgtggaaaaccgcatgcagttactgttttccagtggcgtgatgacgggacgtataacaccggaacgctttgttgaattaaccagcgcaatgcccgccaggctgtttggcctgtggccgcaaaaaggattattagcgcccggttccgatggcgacgtggtgattatcgacccacgtcagagccaacaaattcagcatcgccatctccacgacaacgccgactactcgccatgggagggttttacctgtcagggcgcgattgtcagaaccttatcccgtggtgaaacgattttctgtgacggcacctttacaggcaaagccgggcgaggtcgtttcctgcgacgcaaaccgtttgtccctcccgtgctctaaccactgccagggatctatacacaatcaagaatgatgagtgaggaaaaatgagtaagaaaattgttctcgccctgggcgggaatgcgctgggcgatgacctggccggacaaatgaaagcggtaaaaattacttctcaggcaattgttgatttaattgcccagggacatgaagttatcgtcactcatggtaacgggccgcaggtgggcatgattaaccaggcctttgaagctgccgcaaaaactgaagcgcattcgccaatgctgccgatgtctgtctgtgttgccttaagccagggttatattggttacgatctacaaaacgccttaagagaagaactgctttctcggggcattaataaacctgtagtaacgctggttactcaggtcgaagtcgacgctaacgatccggcattcctcaacccgaccaagccgatcggttcgttctttaccgagcaagaagcagagcaactgacaaaacagggttacactctgaaagaagatgctggtcgcggctatcgccgtgttgttgcctcgccaaaaccggttgatatcattgaaaaagagacggtaaaagcgctggtagaagcaggccaggtggtgatcaccgttggcggtggtggtattcctgttattcgtgaaggtaaccatctgcgtggtgccagcgcggttatcgataaagactgggccagcgcccgtttagcagaaatgattgatgccgatatgctgatcattctgactgcggtagaaaaagtggccattaacttcggtaaagagaatgaacagtggctcgatcgcctgtcattaagtgatgctgaacgctttatcgaagaaggtcattttgcgaaaggttctatgctgcctaaagtggaagctgccgcctcgtttgctcgctctcgcgcaggtcgtgaagcactgattaccgtattgagcaaagcgaaagaagggattgaaggcaaaaccggaacggtgatttgtcagtaattttaaggccgggtgggtaataccatccggccattttcatttaagccacttccagcacttcttttgtcgctttcacgccctgatgcatcaacatcattaacgcctcaagtacgccgccgccaatcgcccgggctttatcagaaacgctggtgaaatcagcggtttcaccacgaggatcgatatcaccaattttaaaaccaccaaccactgccaggccgtcgttcaacaagccacgcaccatccccgtcaacggtgctttaatttcatgctcaccaatccaggcaatcacatcgccctctttcaccagatcgcctaatttcacgttggatcgcataatgcctgcagcaggagcacggatcacccgtcgggtggtatgccccataatattgccaggaacaccggtattctcctgcgcacaaccacagtaaatcacctgaccgagccagtgcccgcgatttgtttcaattaccgcatgacaatccttccctgcagcaaagcccggcccaagcgcgattgttactggtgccatatctgcccgtgttcccaaattctgtttcgccagaatagcgtccaccacgcaaagcggtttcagttcatcaagcaatgaacaggcgggatctaccatcacagggatgaatccgcgttcggtaagtttcatcgcttccgcagagctggttgccaggcgagcagtgacgccttcgaccgtcatttcgccatcgaacacggcctgggcaaacgccacggtacaacgaatcactgtcggtttttccacttccagcatgatcactttaaaacccgcatgatacagacgtagcgccacaccactggcgatatctcccgcaccgcgaatcaccaccagctggtgtccggaaggatgagaaggtttcatcatcagcccacccggcgcgttatttttcacctgtaatatttctgccagcacgctgatggcgatctcctgcggcgtttccgcacctatgttgtaaccaacgggcgcatgtaaacgggcaatatgttcttcagccacgcctttctcacgcaattgacgcaggaaaagctgaaccttgcgacgacttgccagcaaccccaaccatgcaatgggctgttcaatgagtttgtcgagggcttcacgatcctgattattcgtggcaatcaggacaaaattatcagggcgaatatccagtgcttccactgccgcaccaaacgactcagcatggagaagcgtggttgatggagggaatagttcaggattgaggctttcgcgataaatatcggcaacggcaatatcaaatcctaatagcgccgcactctgggctatcgcccggttgacatgccccgcgccaatcaacaccagacgtggacgcataccatggacgctgataaacactgacatcgcacctccacaatctgacccgacagcatccgcaccgttacgagccatacgtccatggaataatcgcggcttacgttcctgcaatgcctgaagcgantcttcaatcaccttccgctcaaccattccgccaccaattgtaccgacgatagagccatcggcgcgcactaacatttgtgcagaatggcggggagtcgagcctcggctatcaataatttgcgccatagcaaacggacaattttgctcttcgagttttgcagcctctgtgaaaatattcataccaacctcaatggatatcctttcagtaacccggaatacccgggccgctaattcacaaatctgcgcgcgattgcaggatgttcttgtatatcgcccagccagattgcctctacgtcgtgttgttgcagcggttgaaggagctcgctttgcgcaatcgcattctcacattgagaaaaacggttaatgaaccagactcgccgacaaccttgcggtacgtttttaaacgccccctgagggtggcgaaccagcgcaacgagatcgctcagttgcaaggttgcatcaggtgttaacccggtaatatcagcaaactgcgaccagcgatggacattttccgtgctcactttcgcgcccaaaatatgtcctcccatcacagcaatcacgcagcaactgcttttgggtatgcaagattcgtgctcatcaggcgcttttaacggcattgcacgcgagccatctgcttcaatgagaattacgtcacactctggtcgttgcaccagtgcatcaatcgcttctggcgtaaatccctgcacttttcccaggttcgctttccagctgtgaaaacaaaatgaaatgggggatgtaagagacgcatgaggaagcatggcgggatcacgacagaaaaccacgggccagtgagacgttggcataaacatatgtgttgtcgtcgtgattaacacacgcctgccgctagcctggagcagttctgccagccaaaaaagcaagctggttttccccccagcaccaacaacagaaatcacagtgggacgtttctgcgcacctaaatcaatgaataatgccgatgggtcaactatacttttcacgagtctttatgacctctctgggataaattatccccaacttaatccatcaggaagtaacgcaattatcaggcgttattagcccctataaataatggaaccactatgtcagccatcgactgtataattaccgctgccggattatcatcaagaatggggcaatggaaaatgatgttaccctggcaacaggggacaattcttgatacaagtatcaaaaatgcgttgcagttttgtagccgaattattttagtcaccggctatcgtggtaatgaactgcacgaacgttatgcgaaccagagcaatatcactattatccacaacccagattatgcgcagggtttactaacatcagtaaaggccgcagtacccgcagtgcaaacagaacattgttttctcacccacggtgacatgccaaccctcaccatcgatattttcagaaaaatctggtcgttacgaaatgatggcgcaatactgccactccataatggcatccccggccatccgattttagtgtcaaaaccatgcctgatgcaggcaatcaagcgccccaatatcaccaatatgcgtcaggcactccttatgggagctcattattccgtcgaagtagaaaatgcagaaataattttagatattgatactccggacgactttattacagcgcaaaaaaggtatactnaaatttaaaaaacgtagttaaacgattgcgttcaaatatttaatccctccagcactctttatcataatgataaggaatcactgattttgagaaaagagaaaaagtgatatatgggatggcaataataattttcaggagtgattttaattctcatttancacctgtgagttcattcacaaaaagcccttaagtttcgagccgcctcacatttttttatatttcccgccaaacctggcaagagtgggtgcgattgttgctctatccccctaaaccaccggatttctcaacaccnnnnnnctcaatgatatctgtataagctaaggagagggttatgggggatattatgcgtcccattccgtttgaggaacttttgacgcgcatatttgatgaataccaacaacaacgctcaatctttggtattcccgagcaacagttttactcacctgtaaaaggtaaaactgttagcgtcttcggtgaaacctgtgccactcccgtcggccctgccgctggcccgcacacgcagctcgcgcaaaatattgtcacttcctggctgactggcggacgtttcatcgaactaaaaaccgtccaaattcttgaccgcctggagctggaaaagccctgtattgatgccgaagacgagtgctttaacaccgaatggtctaccgaatttaccctgcttaaagcctgggatgaatacctcaaagcctggtttgccctgcaccttctcgaagcgatgttccaaccttctgattccggtaaatcgttcatctttaatatgagcgtcggttacaacctcgaaggtattaagcaaccgccaatgcaacagttcatcgacaatatgatggacgcatctgaccatccgaaattcgcgcaatatcgcgatacgctgaataaattactccaggatgacgcatttttagcccgccacggattgcaggaaaaacgcgaaagcttgcaagccttacccgctcgcatccccaccagtatggtgcatggcgtcaccctctccaccatgcacggctgtcctccgcatgaaatcgaagccatttgccgctacatgctggaagaaaaagggctcaacacctttgtgaaacttaacccgaccttactggggtacgcgcgtgttcgtgagatcctcgatgtctgcggtttcggttacataggcttaaaagaagagtcatttgatcacgacctcaagctgacgcaagcactggaaatgctggaacgcctgatggcactggcaaaagaaaaatcactcggctttggcgtaaaactgactaacactctcggcaccatcaacaataaaggcgcactgcctggtgaagagatgtatatgtcaggccgtgcgctgttcccgctctccatcaatgttgcagcagttctctctcgcgcctttgacggcaaactgcccatttcttattccggtggtgccagtcagctgactatccgcgatatttttgatacaggtattcgccctattactatggcaaccgacctgctgaaacctggcggctatttgcgcttaagtgcctgcatgcgcgagctggaaggctccgacgcctggggacttgaccatgttgacgtcgaacgactgaacagactggcagcagatgcgttaaccatggaatacacccagaaacantggaagccagaagagcgtattgaagtggcagaagacctgccgctgaccgactgctacgttgccccctgtgttactgcctgcgctatcaagcaagatattccggaatacatccgtctgcttggcgaacaccgctatgccgacgcgctggaactcatctaccaacgcaacgctctgcccgccattaccggtcatatttgcgatcaccagtgccaatacaactgtacccgcctggattacgacagtgcgctgaatatccgcgaactgaaaaaagtcgcgctggaaaaaggttgggatgaatataagcaacgctggcacaaaccagccggttctggttcacgccatccggttgccgtgattggtgcaggtccggcgggtctggcagcaggttacttccttgccagagcgggccatccggttacgctgtttgaacgcgaagccaatgcgggcggcgtggtgaaaaatatcattcctcagttccgaattccggctgagttaattcagcacgatatcgattttgttgccgctcacggcgtgaaatttgagtatggctgctcacccgatttaaccgttgagcagttaaaaaatcaggacttccactatgttctgattgccaccggcacagataaaaatagcggtgtgaaactggcgggcgacaaccaaaatgtcttgaaatcactccccttcctgcgtgaatacaacaagggtacagcgctcaagctgggcaaacatgtggtcgttgtcggggcgggtaacaccgcaatggactgcgctcgtgcggcgttacgcgttccaggcgtagaaaaagcaacggtcgtttaccgtcgttcactgcaagagatgcccgcatggcgcgaagagtatgaagaagcgttgcacgacggcgtggagttccgtttcctgaataatccggaacgtttcgatgctgatggcaccttaaccttgcgcgttatgtcgcttggcgaacccgatgagaaaggtcgtcgtcgtccggttgaaaccaacgaaacagtaacactgcatgtagacagcctgatcaccgccattggtgaacagcaggatactgaagccctgaatgcgatgggcgtgccgctggacaaaaacggctnnnnagncgtcgaccataatggcgaaactcgtctgactgacgtctttatgatcggcgacgtacagcgcggaccatcctccattgtcgctgctgtcggaaccgcgcgtcgggcgaccgatgccatccttagtcgggaaaatatccgttcccaccagaacgataaatactggaacaacgtcaatccggcggaaatctatcaacgtaaaggcgatatctctatcacgctggtgaacagtgacgatcgtgatgcgtttgtcgcgcaggaagctgctcgctgccttgaatgtaactacgtttgcagcaagtgtgtggatgtctgcccgaaccgcgccaacgtctccattgcggtcccaggcttccagaatagattccagacgctgcacctcgacgcttactgtaacgaatgcggcaactgcgctcagttctgtccgtggaacggtaaaccatacaaagacaaaatcaccgttttcagcctggcgcaagactttgataacagcagcaacccaggcttccttgtggaagattgccgggtacgagtacgactgaataaccaaagctgggtgttaaacatcgacagcgaaggtcagttcaacaacgtaccaccggagctgaacgatatgtgccgcatcatcagccatgtccaccagcatcatcattatctgctgggccgcgtggaggtgtaatcatgttgattctgaagaatgtcaccgcagtgcagttacacccggcgaaagtgcaggaaggcgttgatatcgctatcgaaaatgatgtgattgtcgctatcggcgatgccctgacgcaacgctaccccgatgccagctacaaagagatgcatggtcggattgtgatgccgggaattgtctgctcgcacaaccatttttactcggggctttcccgcggaattatggcaaacatcgccccctgcccagatttcatctcaacgctgaaaaatctctggtggcggctcgatcgcgcccttgatgaagagtcgctctattacagcgggctgatttgttccctggaagcgattaagagcggatgtacatcggttatcgatcaccatgcctctccggcgtatatcggcgggtcgctctccacattgcgcgacgcatttttaaaagttggcctgcgcgcgatgacctgttttgaaactactgaccgtaacaacggcatcaaagagttgcaggaaggtgtagaagaaaacatccgcttcgcccgtcagattgatgaggcgaagaaagcagcaaccgagccgtatctggtggaagcacatatcggtgctcacgcgccgtttaccgtgccagatgccggtctggagatgctacgtgaagccgtgaacgccacaggccgtggtttgcatattcacgctgcggaagacctttacgacgtttcctacagtcaccactggtacggcaaagacctgctggcacgactggcgcaattcgatctcatcgatagcaaaacgctggtcgctcatgggctgtacttgtcgaaagatgacatcgccctactcaatcagcgcgatgcgttcctggtgcataacgcccgttcaaacatgaacaaccatgtcggctacaaccatcaccttagcgacatccgcaatctggcgttgggaacggacggcattggttcggacatgtttgaagagatgaaatttgccttctttaaacatcgcgatgcgggtggtccgctgtggcctgacagttttgccaaagccctgactaacggtaacgaactgatgagccgcaactttggcgcgaaatttgggcttctggaagccggttacaaagctgatttaaccatttgcgattacaantcgccgacgccgctgctggcagacaatatcgccgggcatatcgctttcggtatgggctcaggcagcgttcacagcgtgatggtcaatggtgtgatggtctatgaagaccgtcagtttaacttcgattgcgattccatttatgcacaagccagaaaagccgctgccagtatgtggcgtcggatggatgcgctggcataaatgacagatgccctcttcccgcaggaagagggttaaataaggaaagaagatgattgaacaatttttcaggcccgactctgtcgaacaggcgctggaactgaagcaccgctaccaggatgaagccgtctggttcgccgggggcagcaaactcaatgctacaccaacccgtaccgataaaaagattgccatttccttacaggatctggaactggactgggttgactgggataacggtgcactgcggattggcgcaatgtctcgcttgcagccactgcgtgatgcgcgatttattcctgcagcactgcgtgaagccctcggttttgtttactcacgccatgttcgtaatcagtcgaccattggtggtgaaatcgccgcccggcaggaagagtcagtgctgcttcccgtcctgctggcactggatgctgaactggtttttggcaacggcgaaacgctgtcaatcgaggactacctggcctgcccatgcgatcgcctgctaaccgaaattatcattaaagatccgtatcgcacctgtgcgacccgcaaaattagccgttctcaggcaggtttaaccgtcgtgacggcagccgttgcaatgacagaccacgacggtatgcgaattgcgctggatggcgtcgccagtaaagcactgcgtctgcatgatgtcgaaaaacaaaatctggaaggcaatgcacttgaacaggctgtcgccaacgccattttcccgcaggaagatttgcggggcagcgtggcctataaacgctatatcacgggagttctggtagccgacctgtatgccgactgccaacaggctggggaggaagccgtatgatcatccactttactttaaatggngcgcctcaggagctaaccgttaatccaggcgaaaacgtgcaaaagctgttgtttaacatgggaatgcactctgtacgcaacagtgatgatggtttcgggtttgccggttctgacgcaatcatctttaacggtaatatcgttaacgcgtccttgcttattgccgcacagttagagaaggcagatattcgtaccgcagaatctctgggcaaatggaacgagttaagtctggttcaacaggcaatggttgatgttggcgtggtgcagtctggttataacgatccagctgcagctctgattatcaccgatcttctcgatcgcatcgccgcacctacccgcgaagagatcgacgacgcgctttctggtttgttcagccgcgatgctggctggcagcaatactatcaggtcattgaactggcggttgcacgtaaaaataatccgcaggccaccattgatatcgctccgactttccgtgacgaccttgaagtcattggcaagcattatcctaaaactgatgccgcgaaaatggtgcaggcgaaaccctgctatgttgaagaccgcgtaacggctgacgcctgcgtcattaaaatgttacgtagcccacacgctcacgcactgattactcatctggatgtcagcaaagctgaagccttaccgggcgtcgttcacgttattactcacctgaattgccctgatatctactataccccggggggtcagagcgcaccggaaccgtcaccgcttgaccgccgtatgttcggcaaaaaantgcgtcacgtcggcgatcgcgttgctgcggtggtcgctgaaagtgaagaaattgcgctcgaagcattgaaactcatcgaggttgaatatgaagtgcttaagccggtaatgtcgatcgacgaagcaatggcggaagatgcgcctgtcgtgcacgatgaaccggtggtgtatgttgctggtgcgccagatactctggaagacgataacagccatgcagcccagcgcggcgagcatatgatcatcaacttcccgatcggttctcgccctcgcaaaaatatcgccgctagtattcatggtcatattggcgatatggacaaaggctttgccgatgccgatgtgatcattgagcgaacctataactcaacgcaggcgcagcagtgcccgactgaaacacatatctgctttacccggatggacggcgatcgtctggttatccacgcctccacccaggtaccatggcacttacgccgccaggtcgcgcgcctcgtggacatgaaacagcataaagttcatgtcattaaagagcgagttggcggcggttttggttccaaacaggacatcctgctggaagaagtgtgcgcctgggcaacctgcgtgaccgggcgtccggtactgttccgctacacccgtgaagaagagtttattgctaacacctctcgtcacgtcgcgaaagtcaccgtcaaactgggagcgaaaaaagatggtcgcctgacggcagtgaagatggatttccgcgccaacactggcccttacggcaaccactcactcaccgtaccgtgtaacggaccggcgctgtcgctgccgttatatccgtgcgataacgtcgatttccaggtcaccacctactacagcaacatttgcccaaatggtgcttatcagggttatggcgcaccgaaaggtaanttcgctatcaccatggcattagcggaactggctgaacagttacagatcgaccaactggaaattatcgaacgtaaccgggtacacgaagggcaagagctgaaaattctcggtgcaatcggtgaaggtaaagcgccgacctccgttccttccgccgccagctgcgcactggaagagatcctgcgtcaggggcgcgagatgatccaatggtcttcaccaaaaccacaaaatggtgactggcacatcggtcgtggtgtcgccattatcatgcagaaatcagggatcccggatatcgatcaggctaactgcatgatcaaactggaatcagacggtacctttatcgttcattctggcggtgcggatattggtactggtctggataccgtggtgacgaaactggcagcagaagtgctgcactgcccaccgcaggacgtgcatgttatctccggtgataccgatcatgcgttgtttgataaaggcgcatatgcctcgtccggtacttgcttctcgggtaacgcggcgcgtttggcagcggaaaatctgcgggagaaaattctgttccacggcgcgcaaatgttgggtgagccagtggcagatgttcaactagcaacgccgggcgtcgtgcgcggcaagaaaggcgaagttagtttcggggatattgcccataaaggcgaaaccggcaccggctttggttcactggtgggaactggcagttatatcacgcctgatttcgccttcccgtatggcgcaaacttcgctgaagttgccgtcaacacgcgtacgggtgaaatccgcctggataaattctacgccttgctggactgcggtacaccggtcaatccagagttagcgttgggacaaatctacggtgctaccctgcgagctatcggccacagtatgagcgaagagatcatttatgacgccgaaggtcacccgttaacgcgtgatttacgcagctacggcgcaccgaaaattggtgacattccgcgtgatttccgcgcagtgctggtgccgagcgacgataaagtcggcccgttcggggcgaaatcgatctcggaaatcggtgtaaatggcgcagctccggcgattgctaccgcaattcacgatgcatgcggcatctggttacgcgaatggcatttcacaccggagaaaatactcaccgcgctggaaaagatataaataataaatggccgcttcggcggcctgtttctctgtttggacgatgactaaatagtgactgcgaaaatgagataagccgttctcaaggcgtcctgcgccccaaattcgtgggaatttattttactaattcagatgatcaaatttactttaaaaggagtgaagggatgtctgatataaaccatgcaggttctgaccttatatttgaactggaggatcgccctccctttcatcaggctctcgttggtgccattacccatctgttggcaattttcgttccgatggtaacccccgcgttaatcgtgggggcggccttacagctttccgctgaaacaactgcctatcttgtttcaatggcgatgatcgcctctggtattggtacctggttacaagtaaaccgctatggcatcgtcggttctggcctactctcaattcagtcagtcaatttttcatttgttacggtcatgattgcgctgggcagcagcatgaaaagcgacggttttcacgaagagttaatcatgtcgtcgctcctcggcgtctccttcgttggcgcatttctggttgtcggatcttcatttatcttgccctatttacgtcgggttattacgcctactgtcagcggtattgtggtactgatgatcggcttaagcctgattaaagtcggcattatcgattttggtggaggatttgctgccaaaagcagcggtaccttcggcaattacgaacatctcggcgttggtttattggttttgattgtggtgatcggctttaactgctgtcgcagtccgttgctacgcatgggagggatcgccattgggctatgcgtcggttatatcgcgtcgttatgcctgggcatggtggatttcagcagtatgcgcaatttgccgttaatcaccatcccacatccgttcaaatacggctttagttttagcttccatcagttcctggtggttggcacgatttatctgcttagcgtgctggaagctgtcggcgatatcaccgccacggcaatggtttcccgccgacccattcagggagaagagtatcagtcccgactgaaaggcggcgtgctggcagacggtctggtttctgttatcgcctccgctgtcgggtcattacccttaaccacgtttgcgcaaaanaatggggttattcagatgactggcgtcgcttcacgttatgtcgggcgaaccatcgcggtaatgctggttatcctcggtttgtttccgatgattggcggcttcttcacgaccattccctcggcagttctgggaggcgcaatgacgttgatgttttccatgattgccatcgctgggattcgcatcatcatcaccaacggtttaaagcgccgagaaacacttattgtcgccacttctttaggtttaggacttggcgtctcctacgatcccgaaatttttaaaatattgccagcctctatttatgtattagttgaaaaccctatttgtgctggcgggttaactgcgattttattaaatattatcctccctagtggctaccgacaggaaaacgttctgcctggtattacctcagcggaagagatggattaacagtaaaggagtcaatgatgtcaggagaacacacgttaaaagcggtacgaggcagttttattgatgtcacccgtacggtcgataacccggaagagattgcctctgcgctgcggtttattgaggatggtttattactcattaaacagggaaaagtggaatggtttggcgaatgggaagacggaaagcatcaaattcctgacactattcgcgtgcgcgactatcgcggcaaactgatagtaccgggctttgtcgatacacatatccattatccgcaaagtgaaatggtgggggcctatggggaacaattgctggagtggttgaataaacacaccttccctactgaacgtcgttatgaggatttagagtacgcccgcgaaatgtcggcgttcttcatcaagcagcttttacgtaacggaaccaccacggcgctggtgtttggcactgttcatccgcaatccgttgatgcgctgtttgaagccgccagtcatatcaatatgcgtatgattgccggtaaggtgatgatggaccgcaacgcaccggattatctgctagacactgccgaaagcagctatcaccaaagcaaagaactgattgaacgctggcacaaaaatggtcgtctgctatatgcgattacgccacgcttcgcccctacttcttctcctgaacagatggcgatggcgcaacgcctgaaagaggaatatccggatacgtgggtacatacccatctctgtgaaaacaaagatgaaattgcctgggtgaaatcgctttatcctgaccatgatggttatctggatgtttaccatcagtacggcctgaccggtaaaaactgtgtctttgctcactgcgtccatctcaaagaaaaagagtgggatcgtctcagcgaaaccaaatccagcattgctttctgtccgacctccaacctttacctcggcagcgggttattcaacttgaaaaaagcatggcagaagaaagttaaagtgggcatgggaacggatatcggtnccggaaccactttcaacatgctgcaaacgctgaacgaagcctacaaagtgttgcaattacaaggctatcgcctctcggcatatgaagcgttttacctggccacgctcggcggagcgaaatctctgggccttgacgatttgattggcaactttttacctggcaaagaggctgatttcgtggtgatggaacccaccgccactccgctacagcagctgcgctatgacaactctgtttctttagtcgacaaattgttcgtgatgatgacgttgggcgatgaccgttcgatctaccgcacctacgttgatggtcgtctggtgtacgaacgcaactaataataaaacttttacatcctcgtgaggacatcattatgtctggagacatcctacaaacaccggacgcaccaaagccacagggcgcgctggataattattttaaaattaccgctcgtggcagtaccgttcgtcaggaagtactggctggcttaacgacctttctggccatggtttattccgttatcgtcgttccgggaatgctgggcaaagcaggttttcctcccgcagctgtgtttgttgccacctgtctggtcgcgggcttcggctcgttgctgatggggttatgggctaatttgccaatggcgattggttgcgcgatttccttgacggcgtttaccgcattcagtctggtactcgggcaacaaattagcgttcctgtcgcactgggcgcggtatttctgatgggcgtcatcttcaccgccatttccgtaaccggtgtgcgtacctggatcttacgtaatttgccgatgggtatcgctcacggtacaggtatcggtatcgggctgtttctgctgctgattgctgctaacggtgtgggtatggttatcaaaaacccgattgaaggcttgccagtggcgctcggtgcgtttacctccttcccggtgatgatgagcttgctggggctggcggtcatcttcggtctggagaagtgtcgcgtacccggcggtatcttgttggtgattattgcaatttcgatcatcggcttaatctttgacccagcggtgaaataccacggtctggtggcgatgccaagcctgactggcgaagatggtaagtctctgattttcagcctcgatattatgggcgcactccagccaactgtacttccgagtgtactggcattggtgatgaccgcagtgttcgacgctactggcaccatccgtgccgtcgccggtcaggcgaatttgttggataaagacaaccagatcatcaacggcggcaaagccctgaccagtgactcagtaagttcaatattctccggcctggtgggcgcagcgcccgcagcggtttatatcgaatcagcggcaggaaccgccgccgggggtaaaacagggttaaccgcaaccgtagtgggggcgttattcctgctgattctgttcttatcaccgctgtcatttttgatccctggttacgccactgcacccgctctgatgtacgtaggtttgctgatgttaagtaacgtctcgaagctggatttcaatgattttattgacgctatggctggcctggtgtgtgccgtgttcatcgttctgacttgtaatatcgttaccggtattatgctgggctttgtgacactggtcgtaggccgcgtctttgcacgcgaatggcaaaagctgaatattggtacggtgatcattactgccgcactggtcgcattttacgcgggtggttgggcaatctaatagattctccgcgcctttcagcgcggagatttctttcacagaggattctcaccgctggcaacaatacgctgctggcggactcgcctgagttctctttcagtaagcaactgcagcgcctgtgttgggcaagattcaacgcaggcaggcccctcttcccgctgttcacagagatcgcatttcacgatttgttgccgggtatcccccggcaacgactgaatggtgatcattccaaacgggcacgcactgacgcaactctgacagccaatacaacgggcagaattggtctgcaccacctgctcgcccatcgtcagcgcccccacggggcaagcgccaacacaaggggcgttttcacactgatggcacatcaccggcgcactgatgcagtccagtcgctgtaccttcagccggggtaaaaagatatcggcattcaactcctgttctgaagggtgagcgaccacacaggccacttcacaagtacggcagccaatacagtcagccggattaacgataattaacgatttcatcacgatgccttcgtatcaaacagagttaacatatcgcgcgccgcctgccttcctgcggccattgcagtgacaaccagatccgcgccatggactgcatcaccaccagcaaagacttttttcagatgcgtctgggtaggtaaatacccgacgtcaccggtttgaatcaggccccatttatcgagtttaattccgctgccctgcaaccacggcatggcatgcgcctggaaaccaaaggccataatgagaacatcggcgggcaattcaaactctgaacccgcaaccggacgaggacgacggcgaccatccggccccggctcacccatggcggtacgaatcaggcccaccgcagttaaacgcccatcttcgtcacaagcgatatattgcggctgaacattgaattgaaactcgacaccttcctcgcgcgcattgaccacctctttgcgcgagcccggcatactgacttcatcacgacgatacgcgcaggtcacgctggcagcattgaggcgaatggaagtccgcaaacaatccattgtcgtatcgccaccgcccaataccacgactcgcttaccttccacgtccgtcagcggatactcttcagactccggcaatcccatgagctggcgggtatgggcagtcaggaacggtagagcctgaatgacaccgggcgcatcttcatgcggcagatctgctcgcatcatcccgtaagtccccacgccgatgaaaactgcatcatattcagaagttaaatcgctaaaggtaatatcgcggccaatttcacagttaagatgaaagtcgattcccattgcggtgaatatctctcgccgctggcttaataccgttttatcgagtttgaaaggaggaatgccaaaagtcagcataccgccaatttctggatggcgatcaaagacatcgacctgaactcctgcgcgcgccagaatatcagcacaccctaaccctgcaggcccagcgccaatcaccgccactttctcgatacggggaacaactttgctgacatcgggacgccagcccatcgccagcgcggtatcggtgatgtagcgttccagattaccgatagagactgcgccagagtgatctttcaaagtacatgcgccttcacaaagacggtcctgtggacataccctgccgcagatttctggtaaggaactggtctggtggcaaagttctgccgcttcaataatctttccctcctgtaccagacggatgtaatccggaatagcgttatgcagcgggcaatgccagttgcagttagctttttcggcacaataaacacagcggtcactctcataagtcgcttgttgtggatccagcccgcaatagatttcgccaaagtggtttttccgttcacttgctgaaattttatctgcgcctttacgcgagttaacggggagcaacgctgcactgcgagatggctgagcgtctgatgacgcttttcctgctgccgttttgcgctggcgggccacctttatctgctgtaaccctttatcgtccatcagtcgtaacgcctgtgttgggcaaacttcaatacaggcttgcgtgccggaactgcgctggttacaaaggtcgcatttctgcgcaatcgtatcgaccatctcaacgacgccaaaggggcaagcgattgcgcatcttttacaaccaatacatttttgctcgtccagttgtacgctatcggactggaaagtcagagcattaaccggacaagccgtaacgcaaggggcattgttgcagtgatggcaggccaccggattcgcagccaggcctttccctacaacgtggatacgtggtcgaaagtcactgtgactcagcggccagttttcttgattgtgtgccaccgcacaggcaatttcacaagcatgacagcctatacattccgcggcttcagcagcgataaacttattcatttgcatccctttcatttaatgagttatgtcttctcaaatttcgcgatgcaataaacgggcatatattaggtagcatgaccgttttaattataantttgcgactgagttcaaattattgcccctcaatctatgccgctttcattatttcaacattgccgccccaaatagcgctatccagataaaaacgattaaatgcgagagtgcgacatgccagaatgattaatgaaatatcaatatgagaaaattacagataattccattgtcaggttctcttgtcattttcgtggtttaagcacgattatgtgattgcctccgcaattcctgtctctaactccccttcctcgcaaaaactggcactccacgagcatgtgtttagacagtttcattaacgtaaacggttgctttttactctggcgggcgaaaggagaaacactgatgagcgccatagattcccaacttccctcatcttctgggcaagaccgcccaactgatgaggttgaccgcatattatcaccaggaaagctgatcatactcggtctgcaacacgtccttgtcatgtacgcaggtgcagtcgctgttcctcttatgattggtgaccgactgggcctctcaaaagaagctattgcgatgctcattagctcggatctcttttgctgcgggatcgtcacattattgcaatgtatcggtatcggccgctttatggggatccgcctgccggtgattatgtcggtgacctttgctgctgtaacaccaatgatagccattgggatgaacccggatatcggcctgctgggtatatttggtgccactatcgccgcgggttttatcaccacattattagcgccacttatcggtcgcttgatgcctttattcccgccactggttaccggtgtggttattacttctatcgggcttagcatcattcaggtgggtattgactgggccgccggaggtaaagggaatccgcaatatggtaatcccgtttatttaggtatctcctttgccgtcttaatttttatcttgctcattactcgctatgcgaaaggatttatgtccaacgtcgccgtattactggggattgtatttggctttttactttcgtggatgatgaatgaagtcaatttatccgggctacatgatgcctcgtggtttgcgattgtcaccccgatgtcgtttggtatgccgattttcgatcccgtttccattctgaccatgactgccgtgttaatcatcgtgtttatcgagtcgatggggatgttcctggcactgggtgaaatagtcggtcgtaaactctcttcgcacgatattattcgcgggctgcgtgtcgatggcgtanggacaatgattggtggcacgtttaacagcttcccccacacgtcattttctcaaaacgttggcctggttagcgtgacgcgcgttcatagccgctgggtgtgtatttcttcgggaattatattaatcctgtttggcatggtgccaaaaatggcggtgctggtagcctccattccgcaatttgtgctgggcggcgctggtctggtgatgttcggcatggtactggcgacagggattcgaattctgtcgcgctgtaactacaccaccaaccgttacaacctctatattgtggcgatcagtctcggcgttggcatgactccaacgctctctcacgatttcttttctaagttaccggccgtactgcaaccgctgctacatagcggcattatgctcgcaacccttagcgccgttgtgctgaacgtcttctttaatggctatcagcatcatgctgacctggtgaaggaatccgtctctgataaagatttaaaagtcaggacagtacgtatgtggcttctgatgcgcaagctgaagaaaaatgagcatggagaataatatgaattttttaatgcgcgctatattcagtctgctgttgctttttactctctctattcctgtcatttctgactgtgttgcaatggccattgaaagtcgcttcaaatatatgatgctacttttttaaatggtttttacctgtcggcatccgctcaaaacgggcggttgtcgataaacgctcacttggttaatcatttcactcttcaattatctataatgatgagtgatcagaattacatgtgagaaattatgcaaacggaacacgtcattttattgaatgcacagggagttcccacgggtacgctggaaaagtatgccgcacacacggcagacacccgcttacatctcgcgttctccagttggctgtttaatgccaaaggacaattattagttacccgccgcgcactgagcaaaaaagcatggcctggcgtgtggactaactcggtttgtgggcacccacaactgggagaaagcaacgaagacgcggtgatccgccgttgccgttatgagcttggcgtggaaattacgcctcctgaatctatctatcctgactttcgctatcgcgccaccgatccgaatggcattgtggaaaatgaagtgtgtccggtatttgccgcacgcaccaccagtgcgttacagatcaacgatgatgaagtgatggattatcaatggtgtgatttagcagatgtattacacggtattgatgccacgccgtgggcgttcagtccgtggatggtgatgcaggcagccaatagtgaagcaagaaaattgttgtctgctttcgcgcagcacaattaaaaaaccccgacatctgccggggttatgcgcataacgtaatgcttatttcaccggacgcatcgccgggaacagaataacgtcgcggatggtatggctgttggtgaacagcattaccatacggtcgataccaatccccagacctgctgtcggcggtaagccatgttccagtgcggtgacgtaatcttcgtcgtagaacatcgcttcgtcgtcacctgcatctttcgcggcaacctgatccaggaagcgttgcgcctgatcttccgcatcattcagctcgctaaagccgttaccgatttcacgaccaccaatgaagaactcaaagcggtctgtgatttccgggttaacgtcgttacgacgcgccagcggagaaacttctgccggatattcagtaatgaaggtcggctgaatcagatgtgcttctgccacttcttcgaagatctcggtaacgatacggcccagaccccagctcttctcaacgtggataccgatagattcagcaatcgcttttgcagagtcgaagttgtccagatccgccatgtcggtttccgggcgatatttcttaatcgcttcacgcatggtcagtttttcgaacggtttaccgaaatccagcgtcacgtcgccgtaggtcacttccgtcttaccgagaatatcctgtgccagagtacggaacagcgattcggtcagctcgatcagatctttgtaatctgcgtaagccatatagagttccatcatggtgaactctgggttatgacgtacggaaataccttcgttacggaagttacggttgatttcgaatacacgctcgaagccaccaaccaccagacgcttgaggtacagttccggcgcgatacgcaggtacatgtcgagatccagcgcgttatggtgggtgataaacggacgcgcagcggcaccgccagggatcacctgcatcatcggcgtttcaacttccataaagccgcggttcaccatgaactggcgaataccagagaggatctgcgagcgcactttaaaggtgttgcgggattcatcgttggagatgagatcgagataacgctgacgatagcgcgcttcctgatcctgcaagccgtggaatttatccggcagcggacgcagtgctttggtcagcagacgcaactcggtacagtggatagacagttcgccggttttggttttgaacagtttacctttcgcgccgaggatgtcgccgaggtcccattttttgaactgctcgttgtaaacgccttccggaagatcgtcacgggcaacgtacagctgaatacgaccgccaacgtcctgcagggtaacaaaagaggctttacccataatacggcgggtcatcatgcggccagcaacggcgacttcgatgttcagcgcttcaagttcttcgttctctttaccgtcgaattctgcgtgcaattggtcagaggtatgatcgcgacggaaatcgttcgggaaggcaattccctgctcacgcaggttcgccagcttctcacgacgcgttttcagttcattgttaagatcgactaccgcgtcagcgccctgtgcgtgttgttcagacatgttggttcctcataaccctgctttcaaacttgcttcgataaattgatccaggctgccgtccagcacggcctgcgtattgcgggtttcaaccccggtgcgcagatctttaatgcgggagtcatcaaggacataagaacgaatctggctgccccagccgatgtcggatttgttatcttccatcgcctgtttctcggcatttttcttctgcatctccagttcataaagcttcgctttcatctgcttcatggcctggtctttgttcttgtgctgggaacggtcgttctggcactgggtcacgatcccggtcgggatgtgggtaatacgcaccgcagattcggtacggttaacgtgctgaccgcccgcgccggacgcgcgataaacgtcaatgcgcagatccgccgggttgatttcgatatcaatatcatcatcaacttccggataaacaaacgcggagctgancgacgtgtggcgacgaccgccggagtcaaacgggctcttacgcaccaggcggtgaacgccagtttctgtacgcagccagccgtaagcgtaatcgccggagattttgatcgtcacggatttaatacccgccacttcaccttccgactcttcgatgatttcagttttgaaaccacgcgattctgcccagcgcaaatacatacgctcaagcatgctcgcccagtcctgtgcttccgtaccgccagaccccgcctgaatatcgaggtagcagtcggcgctgtcatattcgccagagaacatacggcggaactcaagctgcgccagtttttcttccagggcgtcgagttcagcaacggcttcgttaaaggtttcttcgtcgtcagcttctacagccagttccagcagaccagaaacatcttccagcccctgtttcatttggtcgagggtgtcgacaacggcttcgagggaggaacgctctttacccagcgcctgtgcgcgttcgggttcgttccagacatccggctgttccagctcggcgtttacttcttccagacgctctttcttggcgtcgtagtcaaagataccccctaagaacgtcggagcgttccgtgaggtcctgaatgcgattatttaccggattaatttcaaacatggtctgatttcttttattgagctagtcaaaatgcggtgataagagcgggattgtacccaatccacgctctnttntatagagaagatgacgctaaattggccagatattgtcgatgataatttgcaggctgcggttgccgcgaaactcgttgatatcgagcttgtaagccagttgcacttcgcgcacgccgttatccggccagagggcggtatcgacattaaaagcaataccatccagcagcggaccgccgccgaccggttcgaccatgactttcaaatgacgttcgcccaccagccgctgttgcagcagacggaaatgaccatcaaacagcggctccgggaacatctgcccccacgggccagcatcgcgcagcagctgcgccacttccatggtcatttcggccgggcttaacgggccgtctgacaccacttcgccttgcaatagcgaagggtccagccactcggtaaccagctcgccaaaccgttgttgaaagagttcgaatttatcctcttccagcgacaaacccgccgccatcgcatgaccgccaaacttcagcatcataccggggtagagtgtgtctaatcgctccagcgcatcacgcatatgcagcccctgaatggagcgaccggaacctttcagcgtaccatcacctgctggcgcaaaggcgataaccggacggtgaaaacgctctttgatgcgcgaagccagaataccgacaacgccctgatgccattcggggtgatacattgccagcccgccgggtagcgtgtcgcgacttcgctccagtttctcgcacagggtcaaggcttcaatctgcattccttgttcgatctcttttcgcgtctgatttagcgcatcgagttcatttgccagcacgcgcgcttcgccgatgttgtcgcacagcaacagcgccacaccgacggacatatcgtccagtcgcccggcagcattgagacgtggccccagcgcaaaacctaaatcgctggcggcgagtttttgtgcatcacggtttgccacttccagcagcgctttaatccctggacggcactttccggcacggatgcgactcatcccctgccaggtcagaatgcgattattagcgtccagcggcacgacgtccgccactgtccccagcgcgaccagatccagcagttctgccaggttaggaattgcgatgccgcgctcatcaaaccagccctgatcgcgcaaaaaggtgcgcagcgccagcatcagataaaacgccacacccacgcctgccagtgatttcgacgggaaattacagtcgcgcaagttagggttaatgatcgcttccgctgcgggtaatgtgtcgcccggcaaatggtgatcggtaacaataaccgggatgcccaacgagcgagcgtgctcaactcccgcatgggaggaaataccgttatccaccgtgacaattaactgcgcgccacgggcatgggcctgatcgaccacttccgggcttaagncgtaaccgtcttcgaaacggtttggtaccaggtagtcgatattgctgcaaccaagcgagcgcatcgccagcacgcttagagccgtgctggtggcaccgtcggcgtcgaaatcaccgaccacaataatccgcgttccttcgcgaaaagcgttgtaaaggatctcaacggccttttcgacgccgctcagttgctgccagggcagcatacctttaacactgcgttccagttcttgcgcactgcgtactccccggctggcgtataaacggcgcagcaagggaggcaattccgcgggcaagtctgccgtttcatcgacttcacggcgacgaagttgtatctgttgtttcacgcgaattatttaccgctggtcattttttggtgttcgtcgangaattctttcatctctttcggcggctggtaacccggaacaagtgtgccattgctcagcacaactgccggagtaccgctaacgccaagctggacgccaagtgcgtaatggtcggcaatatccacgtcgcagctggctggtgcgacgcttttacctgccatcacatcatcaaacgctttgtttttatctttcgcacaccagatagctttcatttctttctcagcatcgctgtccagcccctggcgtgggaaagcaagataacgcacggtgatccccagcgcgttatagtctgccatttgttcatgcagtttgtggcagtaaccacaggtaatatcagtaaacacggtgatgacgtgtttttcctgcggtgctttataaacgatcatctctttttcaagcgcattcaactgctttaacagcatcttattggtgacattgaccggagccgtgccgctaacgtcatacattggcccctgaatgatatgtttaccatcatcggtgatgtacaacacaccgctgttagtcagcacagtcttcatgccagctacgggcgcgggctgaatatcgctgcttttgatgcccattttggctaatgtttgttgaattgccgcgtcatcagcctgagcgaagcctgaaaacgccgctaacaaagtaaacaacataaaacctttcttcataaatcttcccgttcttttcagacatcacgcccgcgggtgatgctgttgatgaagttgccgcagacgctcggtagcgacatgcgtataaatttgcgtggtggagagatcgctgtggcccagtagcatctgcaccacgcgtaaatccgcaccatgatttaataagtgagtggcaaaagcgtgacgcaacacatgcggtgacagcttttcgctgtcgatacccgccagcacggcataatgtttaatgcggtgccagaaggtctgtcgcgtcatctgctgcgcacgctggctgggaaacaacacgtcaattgacacaccattcagtagccacggacgcccatgttccagataggtttccagccagtaaaccgcctcttcacctaacggcaccaggcgctctttgttgcctttaccaatgacccgcactacgccctgacgcaggctgatatcactcattgtcagcccgaccagttcagagacacgcagcccggtagcatacaacacttcaagcatggctttatcgcgtagctccagtggctgatcaattaatggtgcctgtaataaacgttcgacctgcgcttcgcttaaatcttttggcaaacgctggggcaatttcggtgaagcgagatgcgcactgggatcatcttcacgaaacttttcgcgataaagatactggaacaatcggcgcactgcactcagcaaacgcgctgagctggtggctttatacccgccctccagccgttctgccagtaatgcctgtaaatcgtcactttgcgccgtcgccagcgtcaacccgcggtgatgcaaccactccaccatcattgacagatcgcgacggtaagcgttcaacgtattttcagccagatttttttccagccacagagcatcaagaaactgctcgatgcgtgccagatcctgtttcacttgcgccccttatggtcactcatttgatccattatgccttattgtgccgtgactaaagcgattctgatacactagccgcaaaagccacagcagaatcgagaagcttacgttatgaatatgggtcttttttacggttccagcacctgttacaccgaaatggcggcagaaaaaatccgcgatattatcggcccagaactggtgaccttacataacctcaaggacgactccccgaaattaatggagcagtacgatgtgctcattctgggtatcccgacctgggattttggcgaaatccaggaagactgggaagccgtctgggatcagctcgacgacctgaacctcgaaggtaaaattgttgcgctgtatgggcttggcgatcaactgggatacggcgagtggttcctcgatgcgctcggtatgctgcatgacaaactctcgaccaaaggcgtgaagttcgtcggctactggccaacggaagggtatgaatttaccagcccgaaaccggtgattgctgacgggcaactgttcgtggggctggcgctggacgaaactaaccagtatgaccttagcgacgagcgtattcagagctggtgcgagcaaatcctcaacgaaatggcagagcattacgcctgatatcactgacggcttagcgcatatgctttgccgtcatctttatctttgcgtctcttgttgcaacaaaatccgccgtaaatcccgccattcggcttcgtccatgctgtcggctgccagccataaatgttgccgtttaccgctatcagaacgtaaacgcagcatcatgccgctcttaatcatccacggcgctttgacgatgctccactcctgcccttgccaacgcaaacgcccgtccatcaacaagcgaatttccccctggcgagcattaatacgccgctggctgcgaacgcaatcaaacaccaccagcgaaagtaacaccatccataacggggtgtaactgagcggccagggcatgagtaaaataacagcggcaaccagcccatgaatcagcaaggaaagccactgtgcgcgccaggagacgcgcaaatcagattgccacaggaccacgttcccggttccgtgtctggatgagtcggaccatcatttccagttctgcatcggccggtttaccgtgattcatcagccagttaaacagatcgggatcgtcacattccagcagacgaataaagatgcgtttttcgtcatcgcttaagctgtcatactcatgttcgaaaaacggcatgattgaaatatcgagttcgcgcataccacggcggcatgcccaatgaatgcgggctttgttgttaatgtccatcttcttcctgtctcacgaaaatccagtacccggctattgtaacgtgtttttcgacttcttttacgggaatatcagtaaacacaatcgcgatcgcgaaattaattcacaacaatttaagggcttcattttttgggaagtcgcctcgcagaaggcacagatcgcgtagtgaaagcacttgcattgcctcatagctcttttaccattagttattaatacgccgttaagcaactcaggactctattatggcttttacaccttttcctccccgtcagcctacggcttctgcccgtttgccactgacgctgatgacgcttgatgactgggcgcttgccaccattactggcgcggacagcgaaaaatatttgcagggccaggtgacagcagatgtcagccagatgacagatgatcagcacctgctcgccgcccattgcgacgccaaaggtaaaatgtggagcaatttacgtctgttccgcgacggcgatggctttgcatggattgaacggcgcagcgtgcgtgaaccgcagctggctgaactgaaaaaatatgcggtgttctctaaagtgaccatcgtgccagacgacgagcgtgtgctgcttggtgttgccggttttcaggcgcgcgccgcgctggcaaatatctttagtgaactgccttcgaaagaaaaacaggtagttaaagaaggcgcgaccactttgctatggtttgaacacccggcagaacgtttcctgatcgtaaccgatgaagctactgccaatatgctgaccgataaactgcgcggtgaagcggaactgaacaatagccaacagtggctggcattaaacattgaagcgggtttcccggtgattgatgccgcgaacagcgggcagtttatcccacaggcgaccaacctccaggcgctgggcggtatcagctttaagaaaggctgctataccggacaagagatggtggcgcgagcaaaattccgtggtgccaacaaacgcgcgctctggttgctgacaggtagtgccagccgactgccggaagctggtgaagacttagagctgaaaatgggcgagaactggcgtcgtactggtacggtgctggctgcggtaaaactggaagatggtcaggtcgtggtgcaggtagtgatgaataacgatatggaaccggacagcatcttccgcgtgcgcgacgatgcgaatacattgtgtatcgagccactgccgtattcgctcgaagagtaaatctctgtgtcgcatcaggcatttatcgcctgatgcgacgctggcgcgtcttatcaggcctacaaaggcatacccattacgcctgcccaatatacaaatagatcgccagaaagtggcacacactaccgccgagcacgaagccgtgccagatggcatggttgtatggaatgcgtttgcagacgtagaaaatcaccccgagcgaataaaccacgccgcctaccgccagtaaggtaacgctgcccgccgcgagcttaactgccatttcataaattaccaccagcgacagccagcccatcgccagataagtcaccagagataaaattttgaatcggtgcgcgatggtcagtttgaacagaatccccagcaatgccaggctccagataacaatcatcaacccgcgcgctaacggagaatccagccccaccagcaaaaacggcgtgtaggttccggcaatcaacaggtaaatagcgcaatggtcaaatttcttcagccacatttttgcccgttgatgaggaatggcgtgatagagcgtcgaagcgaggaacagcaggatcatactgccgccatagaggctgtagctggttatcgctgtggcgctggcattgagatccaccgcctgaaccagtagcaacaccagcccaacgataccaaacaccaacccaatgccgtgactgacgctgttggcaatttcctctgccagcgaatatccctgcttaatgaggggcttctgaaccataacttactccggagaaacgtacacgcacatgtatacctctccagcgtaactgagaatagttccagtgaacacctgttagctaaaataaattctgatttgagactaatctcctaaaaatcatgaaattaaatgcgaaatttcaactaacaggcgtgagttcaatttaaaggcatttaaattcaatcacataaaactgtgtctggccgggatagatgtcggcaatgacctttttcagttcagtcagggtcatattttcctgctctgcatgtttttccgtcagcgtatccagcgttacggttgaggttgcggtgacttcaatcgtgcaaaaataaccgtcatcttcaaaacgtccgacacgaagcacatcacccgttttgaagtgcgattcagactcgtcgcggatggtgatggttttacgcccagccagaatgtcatcctggaaacgttgaaaaaaagtgatgtcgtttggctgcatggtactatttcctgtaagaattgactcatctggagcctatgatagtgaaaaaactcaccttaccgaaagatttcttatgggncggcgcagttgccgctcatcaggtcgaangcggctggaacaaaggcggaaaagggccgagcatttgtgacgttctgaccggtggcgcacacggcgtgccgcgcgaaataaccaaagaagtcttgccaggcaaatactatccaaaccatgaagccgttgatttttatggtcactataaggaagacatcaagctatttgccgaaatgggcttcaaatgttttcgtacatccattgcctggacgcgcatttttccaaaaggcgatgaagctcagccaaacgaagaagggctgaagttctacgactctctgttcgatgaactgctgaaatacaacatcgaaccggtgatcaccctctcccactttgaaatgccgctgcatctggtgcagcaatacggtagctggaccaaccgtaaagtggttgatttctttgtacgtttcgcggaagtggtatttgaacgctataagcacaaagtcaaatactggatgaccttcaacgaaattaacaaccagcgtaactggcgtgcaccgctgttcggttactgctgctccggcgtggtgtataccgagcatgaaaacccggaagagacgatgtatcaggtgctgcatcaccagtttgtcgccagcgccctggcagtgaaagccgcgcgtcgcattaacctggagatgaaagtcggctgtatgctggcgatggtgccgntctatccctactcatgtaacccggacgatgtgatgttcgctcaggagtcgatgcgcgaacgctacgtctttaccgatgtgcagctacgcggctattacccgtcgtatgtgttgaacgagtgggagcgtcgcggatttaacatcaaaatggaagatagcgatctcgatgtactgcgcgaaggcacctgcgattatcttggtttcagctattacatgaccaacgcagtgaaggccgaaggcggcaccggcgatgcgatctctggttttgaaggcagcgtaccaaacccgtatgttaaagcatctgactggggctggcagattgatccggtgggtctgcgttacgcactttgcgaactgtatgcgcgttaccagaagccgctgtttattgtcgaaaacggttttggcgcttacgacaaagtggaagaagatggcagcatcaacgacgactaccgcattgactacctgcgcgcccatattgaagagatgaaaaaagcagtaacttacgatggcgtggatctgatgggctacacaccgtggggctgcatcgactgcgtgtcgttcactaccgggcagtacagcaaacgctacggctttatctatgtgaataaacatgacgacggtactggcgatatgtcgcgttcacgtaagaagagctttaactggtacaaagaagtgattgccagcaacggcgagaatctgtaattagccgatgtgcctgatgcgctacgctcatcaggcctggcactcttttaatatattgagctcgcaatattttatattacgcctcagccgaaacacacaaagcgcactttattaacaatctaaaaaggcgccgaagcgcctttagaagatagtcgaatcagtgaattactggtattcgctaatcggtacgcaggagcagaacaggttacggtcgccgtaaacatcatccaaacgtttcactgtcggccagtatttgtctgccacgcctgccgggaataccgcaacttcacggctgtacggatgcgcccactcggcgaccagttcgctctgaatgtgcggcgcgttcaccagcgggttatcttccagcggccagacaccggctttcacctggtcaatttctgcgcggatagccagcatcgcgtcgataaagcgatccagttccactttgctttcagattcagtcggttcaaccatcagcgtacctgccaccgggaacgacatcgtcggcgcgtggaaaccgtagtcgatcaggcgcttggcaatatccagctcgctgatgccggtttcttctttcaacggacgaatatcgaaaatacattcgtgcgccacgcgaccgtcacgaccggtatacagcaccgggaaggcatcctgcaggcggctggcaatatagttggcgttgangattgccacctggcttgcttttttcagcccttctgcgcccatcatgcggatgtacatccagctgattggcaggatagaggcgctaccgaacggtgccgcagaaaccgcgccctgacgggttaacatgccttcgatttgcaccacgctatgacccggtacaaacggagccagatgcgctttcacgccgatcggtcccatacccggaccaccaccgccgtgcggaatgcagaaagttttatgcaggttaaggtgtgaaacgtctgcgccaataaagcccggcgaggtgatgccaacctgggcgttcatgttcgcgccatcaaggtaaacctgaccgccgaactgatgcacgacttcacacacttcacggatcgtttcttcatacacaccgtgggtggaaggataggtcaccatgatgcaggagagattatcacctgcctgttcggctttcgcgcgcagatcagtcagatcgatatttccgtttttatcacacgccacaaccaccacctgcattcctgccatatgtgcagaagcggggttagtgccgtgcgcagaagccgggatcaggcagatatcgcgatgcccttcgttgcggctttcatgataatgacgaatcgccagcaggcccgcgtattcgccctgtgcgccagagttcggctgcatacaaacggcgtcgtaaccggtcagtttcaccagccagtcagccagctgcgcgatcatctgctgataaccttcggcctgctccggcgggcagaacgggtgcagttcggcaaattccggccaggtgattgggatcatctcggcggcggcgttcagtttcatggtgcaggaacccagcgggatcatcgcctgattcagcgccagatctttacgctccagcgagtgcatatagcgcatcatttcggtttcgctgtggtagcgattaaacaccggatgggtgaggatttngtcgtcgcgcagcatcgcaggctggatagagcggctgtcgtgagccacgtctttgtccagcgtgtcgatgtccagcccgtggttatcccccagtagtacgctgaaaagctgcatcacgttttcgcgcgtggtggtttcatcaagggtgatcccaaccgcgttcaggatatcgctacgcaggttgatttcagccgcttcggcacgcgccagtacgcccgccttgtcggccacttccacacacagagtgtcgaaatagtgcgcatggcgcagcttcagacctttttgttgcaggcctgccgccaggatatcggtcagacggtgaatgcggttagcgatacgtttcaggccaatcgggccgtgataaacggcatacaggctggcgatgtttgccagcagcacctgagaagtacaaatgttggagttcgctttctcacgacgaatatgttgctcgcgagtctgcatcgccatgcgcagcgcggtattgccagctgcatctttcgatacaccgataatacggcctggcattgagcgtttgtattcgtctttcgccgcaaagaatgccgcgtgtgggccaccgtaacccatcggtacgccaaagcgttgcgccgaaccaaaaacaatatccgcgccctgtttacccggcgcagttaacagcaccagcgccataatatcagcggcaacgctgaccacaattttgcgtgatttcagttcgctgataagcgcagtgtagtcgtgaatttcaccggtagtgccaacctgctgtaacagcacgccgaagatgtcctgatggtcgagcactttttgcgcatcatcgacaatcacttcaaaaccaaaggtttcggcacgagtacggaccacatccagcgtttgcggatgcacatcggaagccacgaagaagcggttggcatttttcagtttgctgacgcgtttcgccatcgccattgcttcggcggcagcggtggnttcgtcaagaagagaagcagaggccatatccagcccggttaaatccagcgttacctgctggaaattgagcagtgcctcaaggcggccctgcgagacttcaggttgatacggagtatacgcggtataccagcccggattttccagcatgttacgcaggataaccggcggtaactgcacggcggtgtaacccatgccgatgtnagacgtgaagcgtttattgcgactggcaatagccttgagttccgccagcgcggcgtattcggtcgccggtgcgccaacctgnggcggggtcgcaagctgaatatctttcggtacaatctggccggtcagcgcgtttaacgattgtgcgccaacggcattcagcatttcttgctgttgcgcggcgtccggtccgatatggcgttcaataaaagcgccgctattttcaagctggcttaacgtctgtgtcatgagcgatggttcctgaaacgtgcagtgaattgtgaacctctctccttgcgaagagagtgagggtgaggtgtaaatttcctcaccctgatcctctcccgcagaagaggaataaagccgttactcgtcttctaacaatgcttcgtatgcggtcgcatccagcagtgattccagttcgctttcatcgctggctttgattttaaagatccagccacctgcatacggttcgctgttcaccagttccggggaatcgctcagtgcgtcgtttaccgccacgatttcaccgcttactggcgcataaatgtctgacgccgcttttactgattcggcaaccgcgcagtcatcgcccgcgctaaccgttgcgcccacttccggcaggtcaacaaacaccatatcgcctaacagctcctgagcatgttcggtaataccaacggtgtaagtgccgtcggcttctttacgcagccattcgtgttctttgctgtatttcagttctgctggtacgttgctcatcaatcaatctccaaaaaagtaaatcacgcgacggctttgccgttacgcacaaaaacaggttttgtcactttaaccggcatttcacggttgcgaatttgcacaatcgccgtttcgccaatacctttcggcacgcgtgccagcgcaatgctgtaacccagcgtcggggagaaagtcccgctggtgataatgccttcatgctggttgccctgcgcatcggtaaaacgtaccggcagttcattacgcagcacgcctttttcggtcatcaccagaccaaccagtttttctgtgccatgctcacgctgcacttccagggcttcacgaccgatgaagtcacgatctgccggttcccaggcgatagtccagcccatgttggcggctaacggagagatggtttcgtccatctcctgaccataaagattcatgcccgcttccagacgcagcgtgtcacgcgcgcccagaccgcatggcttaacgcccgcttccaccagcgcacgccagaaatcggnnnntttttcattgggcagcgcaatttcatagcccgcttcaccggtataaccagtggtggcaataaacagatcgcccgcctgcacgccaaagaacggtttcatcccttccaccgcctgacgctgagcatcattaaacagtgtggcagcttttgcctgcgcattcggcccttgtacggcgatcatggaaaggtcatcacggacggtaatttcgatgccgaaaggttcagcgtgttgggtaatccaggagaggtctttttcgcgggtggcggagttaacaacgaggcggaagaaatcttcagtaaagtagtagacgatgaggtcatctatcacaccgccagaggcattcaacatccccgagtaaagggctttgccgcttttggtgagcttcgccacatcgttcgccagcagataacgcagaaactcccgggtgcggctgccgcgaagatcgacgatggtcatatgtgacacatcaaacattccggcatcggtacgtaccgcatgatgttcgtcgatttgcgaaccgtaatgcagcggcatcatccagccgtggaaatccaccatgcgagcgccgcaaagcgtgtgttgttcgtacaaaggagtctgttgtgccatcttgtcctcattgaataagcggggctgacaactttttcatggtgaaattatcaccacgaaacccagcatcggagccactcccggtccccaacgcaatcgttctcttttgcctgaacttaccaccgaaacagactgttaaccataaggtaaaattgatcatcacattagcttatggttaaaaaacgccaaaatcgcaacagaataaaaaaccaaaaaatacacaagtttctatataaagatgatgtgatgagaaagttaatttgaataaggcaatattaagagctgaaaaaatgtcaaaaaacactaaatcaaaaattcgtgacattagaaaatataatgcgaaaacggaggtgaaattagtttatttcaaatgaggaaaatctcccggcgaaaaaaccgggagatgaaagtgtgatgggtatcaaataaacagcagaagagaaatttttaacgcagccattcaggcaaatcgtttaatcccattgcctggcggataagttgtggtttaacgccaggaagcgtgtcggccagtttcagaccaatatcacgcagcagttttttcaccggattggtaccagaaaacagatcgcggaatccctgcataccagccagcatcagcgccgcactgtgcttgcggctacgctcatagcgacgcagataaatgtactgcccgatgtctttaccctgacgatgcaaccgtttcagttcagcaatcagctctgcagcatccataaagccaagatttaccccctgccccgccagcgggtgaatggtatgcgcggcgtcgcccaccagcgccagacggtgcgcggcaaactggcgcgcataacgccccgtcagtgggaacacctgacgcgcgctctcaaccttgcataagcccaggcgattatcaaaagcgatatttaacgcgcgattaaattcgtcttcacttgcctgctgcatccgctgcgcttcntctggcgacagtgaccagacaatcgagcaaagatgcggatcgctaagcggtaaaaaggccagaatgccttcgccatggaaaacctgccgcgccaccgcatcatgcggttcttccgtgcgtatggtcgctaccagcgcgtgatgctgataatcccagaaagtcagcggaatatcggctttgttgcgcaaccaggaattagcgccgtccgcgccaatcaccagacgcgccgttaacatactgccatctttcagcgtcaggaaggtttcattttctccccaggcgacctgctgtaattctgcgggggccaaaagagtgatatctgacgactgctgcgctttgttccacagcgcgtagtgaatcactgagttttcaacgatgtgcccaagatggctatagcccatgctttgatcgtcaaacgagatgtgaccaaaactgtctttgtcccacacttccataccgtgataacagctggctcggcgagagagaatgtcctgccagacgccaagacgggtgagtaatttttcgctggcggcattgatagccgaaacgcgcagttgtggtggtgcatccgccgccagaggttccggtacgcgctgctccagtacggcaacgcgtaagccgctaccctgtaagccgcaggcaaccgccagccccaccatgccgccgccaacaatggctacatcaacactttgcattgtttattccttaataaccgccttcaacgcgccacccaaccganggtgcgctgcgccagcacatcgcgtgccggggtgaataattccatcgtcatcagcccgatgttgcgcccgacaaccagtggcgtccaacggttggcaaaaagatgtacaaggctgtccgtgacgccaatggttgcttcgcgatcgctctgtcgacgctgctgataacgacacaatacgccgtaatcacccatgtcttctccgcgctcctgcgcctgagtcagggtttccgcaagactcatgacatctcgcataccgaggttgaacccttgcccggcaatcgggtgcagggtttgcgccgcattgcccaccagcacggtacgatgggtaatagatctggcggcgtgggttaacgccagcggataagcactgcgtttaccagcgtgggtaattttcccaagtcgccagccaaaggccgactggagttcacggcaaaacttctcgtcgctccacgacagcacctcttcgcgccgttccagtggatgacaccagaccagcgaacagcgtccgtcagacatcggcaacatcgccagcgggccatgttgcgtaaagcgttcaaaagcgcgcccttcatgcgcaacggaagtcgcaacgttggcaatcacagccagttgttcgtaaggctcctgctgccagtcaacgccgcacacagtggctaacgctgaatgggtgccatcagcggctaccagcacgcggcccgtcagcgtctcgccaccctccagcgtcacttcaacgtgactctgagtacgggcaacgttagccacgcgatcagggcaatgcagcgttacgccaggtgctttacgcagcaatgcaaacagccgttgcccgacattgtgcaattcgacaacctgtcccagcgccgccagttggtaatcttctgcggcgagggtgacaaatccagcgtgacctcgatcgctgacatgcacggtggtgatggcagttgcgcaatccgccagagattgccaaacgccgatgcgcgccagttgctgacaggtacccgccgccagcgctatcgctcgtccatcaaagcccggatgagcatgtgactctggcgcagtcgcttcaatcaaatgtaccggcagcgccccgtgacttaaccgggaaatagccagcgccagcgtcgcgcccgccatgccgccaccgacgatgattacgctcattgctttctcgcagcagccatcaacgcttcgatttcttccggctttttcaccacgctggcggtgaggttttcgttgccggtttcggtaatcacaatgtcgtcttcaatacgaatgccgataccgcgatattgttctggcacatccgcatccggcgcgatatacagaccaggctctacggtcagtaccatccccggttccagaatgcgcgagcgatcctgaccataaacgccaacgtcatggacatccagtcctaaccagtggctaaggccatgcataaagaaaggacgatgggcgttctgagcgatcagttcatcaatatcacctttcaggatgccgagttttaccaggccgctaaccataatgcgcaccacttcaccggtgacttccagaatggaggttcccggacgatacaggcgcaggctggtttcaagagactccagcacaatgtcgtagatttcgcgctgggcctgggtgaatttgccgttgaccgggaaggtacgggtgatatcgcctgcgtaacctttgtattcgcagcctgcgtcaatcaacaccaggtcgccgtcgcgcatttcacactcgttttcggtgtagtgtaaaatgcagccgttttcaccgctgcctacaatggtgttataggacggatagcgcgcaccgtggcggttaaattcgtggtgaatttcgccttccagatggtactcgaacattcccggacggcatttttccatcgcccgtgtatgtgccatggcggtgatttctcccgcgcggcggagtacggcaatctcttctggcgatttgaacaggcgcatttcatgaacaacaggacgccagtcgatcatcgttgccggtgcggtgagattttgccgcgaacctttacgcagtttttccagcgcactgttcacgatttcatcagcatatgcatattcgccctgagcatggtaaaccacatccagaccattaagtagttgataaagttgctgattaatttcgctgaatgccagtgcgcggtcaacgcccagtttctctggcgcggcatcctggcctaagcgacggccaaaccagatctccgccgtcaggtcgcgaacgcggttaaacagaacgctgtggttatgagtgtcatcgcttttaatcagcaccaacaccgcttccggttcgttaaagccggtgaagtaccagaagtcactgttctgacgataggggtattcgctgtcggcgctacgtgttacttctggtgcagcaaaaatcagcgcggcgctgccgggttgcatttgctccaccagggcctgacggcgacgctgaaactcttgccgggatatctcactcataacactctccttacgttttttgtttttagtgtagagtcggtttttgtacttctggcgcggtcggttgcggatgagtaaaggtgtcgtggcataacagcgcggcaacacgaacgtattcgatgatctcttcaagcgacatttcaagctcttcctgatcttcgtcttcgtcgtaacccagttgcgcaatgttacgcagatcgtcgatagcttcaccggtttcgccggtcactttatccagcttcggttgcgtaacaccaagaccaagcaggaagtgattgacccaacctgccaatgcatcagcccgatcgaaaacgctgacatcatcgccatcaggcagataaagctgaaaaaggaagccgtcatcctgcagggcatcgctggtggcagagtgcattttacgcagtgcctgtgccagctcatgaccgaaagccatgccttcgttcgtcaggtcgtgaagtagcggtagccatgagctgtcatcgttaccgccacatatcatcccactgattaaaccatgcatctcagcaggggtcagacccgtcccttgttggttcagatactggttcatttcgttgtaaccaggcatttcgttctgtatagacataagcattcgtcgtcaaagggaggaatattcatgatatgctaccactttgggccctggtggaccagaaaagggcttgtctcttctcatcagggtagctatagtgtcgccccttcgcagaccatgggtctaaagacgaaggcagcgcagtcaatcagcaggaaggtggcatgtctgcacaacccgtcgatatccaaatttttggccgttcactgcgtgtgaactgcccgcctgaccaaagggatgcgttgaatcaggcagcggacgatctgaaccaacggttgcaagatctgaaagaacgcactagagtcacaaatactgaacagttggtcttcattgccgcattgaatatcagctatgagttagcgcaagaaaaagcgaagactcgtgactacgcggcaagtatggaacagcgtattcggatgctgcagcagaccatagaacaagcgttacttgaacaaggtcgcatcaccgaaaaaactaaccaaaactttgaatgacacttttcggtttactgtggtagagtaaccgtgaagacaaaatttctctgagatgttcgcaagcgggccagtcccctgagccgatatttcataccacaagaatgtggcgctccgcggttggtgagcatgctcggtccgtccgagaagccttaaaactgcgacgacacattcaccttgaaccaagggttcaagggttacagcctgcggcggcatctcggagattcccttcttatctggcaccagccatgacgcaactaccagaactcccactgacattatcccgacaagaaatccgcaaaatgattcggcaacgtcgtcgtgcgttaacgccggaacaacagcaggaaatgggtcaacaagccgctacccggatgatgacttatcccccggtggtgatggcgcatacggtcgctgtattcctctcttttgatggtgaactcgacacccagccgcttatagaacaantctgnnnnnnnngtaagcgcgtatatcttccagttttgcatccctttagtgccggtaatttgctgttcctgaattaccatccgcaaagcgaactggtgatgaacaggttgaaaatccatgagccaaaactggatgtgcgtgacgtgctccccctttcccgattagacgtgctgatcacaccgctggtcgcctttgatgagtacggtcagcgcctgggaatgggcggtggtttttatgatcggaccttacaaaactggcagcactataaaacgcaaccggtgggttatgcgcatgattgtcagttggtggaaaaactccccgttgaagagtgggatatccctcttcctgcggtggttacaccgtcgaaagtctgggagtggtaagggcgatacacctgcatcgccctgattgacatcgttgattctttaacctaatttagtgagtaagggtaagggaggatgactcctcccctgagactgactgttaataagctggcaaacttatcagtaacagtacaatcagtatgangacaagtcgcatcataatccttctccttcaagccctcgcttcggtgagggctttaccgttacagccccatgctgccctgccatcgtaaactctctttaaataaccacaacgcattgatctacctttaaatcttttcttcgagcgcactcgtaaaacgtcatgtaaggcagacatacattgcaggaataagggattaattacggcagtaaacgtgggcgatgaagtggctatcaaaaagttcggttcagggcgatgcaccccgcatcgccctgattgacatcgttgattctttgacctaatttagtgagtaagggtaagggaggatgactcctcccctgagactgactgttaataagctccgaaacttatcagtaacagtacaatcagtatgatgacaagtcgcatcataanccttctcctttaagccctcnnntcggtgagggcttcaccgttacagccccatgctgtcccgccatcgtaaatccccattaaataaacacaacgcattgatctgactttgatttattttctggagcagactcgcaaagtanaatgcgcaacgcggcaacggtgtggagaagggataaaaaaacgggcaagtcagtgatctgcccgttaattttcagagaaggggaattagtacagcagacgggcgcgaatggtacccggaatagctttcattgcctgcagcgctttttcggcaacgtcttcgtcagcttcaatatcaataactacataacccatctgggcggaagtttgtagatattgcgcggcgatgttgacgccctgctcggcgaagattttgttcagcgcagttagcacgcccggacggttttcgtggatgtgcatcagacgacgaccaccatgcagtggcagcgagacttccgggaagttcaccgcagagagcgttgagccattgtcagaatacttgatcaatttacccgcaacttccaggccgatattctcctgcgcttcctgagtcgaaccgccaatgtgtggcgtcagaaggacgttgtcgaattcacacagtggagaggtaaatggatcgctattggtcgccggttccgtcgggaatacgtcgattgccgcccccgccagatgtttgctcgccagcgcatcacacagcgccggaatatccaccacagtaccgcgcgaggcattaatcagcagcgagccgggcttcattagcgaaatctctttcgcgcccatcatatttttggtggacggattctctggtacatgcagactcaccacatcgctcatattcagcaggtcagaaagatgctgtacctgagtggcgttgcccagcggcagtttgttttcaatatcataaaagtaaacatacattcccagcgattcagccagaatgcccaattgcgtaccaatatgaccgtagccgatgatacccagctttttgccgcgcgcttcaaaagaacccgccgccagtttgttccacacgccacggtgcgctttagcattggcttccggcacgccgcgcaatagcagcagcagttcgccaatcaccagctccgcaacagagcgcgtatttgagaacggtgcgttaaataccgggatcccgcgctttgccgccgcatccagatcaacctggtttgttcctatacagaaacagccaatagcgaccagcttttctgcggcgttgatcacgtcttcagtcagatgggtacgggatcgcaggccgatgaagtgggcatcgcggatggattcttttaattgttcatcatccagcgcgcctttgtgaaattcgatgttggtgtaaccagctgcacgaaggctttccagcgccttttggtgcacgccttctaccagcagaaacttaatcttgtctttctccagcgatacctttgccatttacccaatcctgtctttgaaatgttgtgtgcggatttgcatccgcctttcaacatatcaaaaaataatattgcggnnnnatgaacgtttgcgtcgcgatgttgaggaaatatcacgcaaaggtatttcttggttgaatatgctggtttagaggatttatttagagcaatcgacaatagccaagtaaaaacgtgacacatgtcaccaaatttaatgaagagaatttttttaacgggggaggttcccccgtcagatcatttcacaatggttttgacaccgtcaggtgtgccaatcagcgcaacgtccgcgccacggttagcaaacaagccaacagtcaccacgccaggaatcgcatttatggcgttttccatcgctatcgggtcaaggatttccatgccgtggacgtcgaggatcacgttgccgttatcggtcactacgccctgacggtattccggacgaccgcccagtttcaccagctggcgcgccactgcactacgtgccatcgggataacttctactggcagcgggaatttacccagaatatcaacctgcttggaagcgtctgcaatacagataaatttttctgcaaccgaagcaatgattttttcacgggtcagcgccgcgccgccgcctttgatcatttgcatgtggccgttgatttcatctgcgccatcaacgtagatgccaaggctgtcgacttcgttgagatcaaaaacgtgaatgccgaggcttttcagtttttcagtggaagcatctgaactggaaacggccccttcaatctggcctttcattgtaccgagcgcgtcaataaagtgtgcggcggtggaacctgtacctacaccaacaatggtgccgggctgaacatactgaagtgccgcccatcctactgcttttttcaattcatcctgcgtcatgatcgtttcgcctgtggtatgaaatnncacacgcattatatacaaaaanagcgattcagaccccgttggcaagccgcgtggttaactcatccataaaatatcgcgcaatggcgggcatcccctttcgccccgcaaataaagcatacaacggtctgggtatgccgctccacggtgcgaacagaggcaataacgccacgccattcaacataaccagggcgcgaagtcgctaagcgaaatgcaatagcgcaaatccctgatcttttaagctgcgcgtttaaccattgatacaaatgttacccgccgacggctgcggtatatgcaacctgacacaaaattgtgtcatagtgcaggaaaaagcatttaccaggagcagacaacagcaatgaaacgcccggactacagaacattacaggcactggatgcggtgatacgtgaacgaggatttgagcgcgcggcacaaaagctgtgcattacacaatcagccgtctcacagcgcattaagcaactggaaaatatgttcgggcagccgctgttggtgcgtaccgtaccgccgcgcccgacggaacaagggcaaaaactgctggcactgctgcgccaggtggagttgctggaagaagagtggctgggcgatgaacaaaccggttcgactccgctgctgctttcactggcggtcaatgccgacagtctggcgacgtggttgcttccggcactggctcctgtattggctgattcgcctatccgcctcaacttgcaggtagaagatgaaacccgcactcaggaacgtctgcgtcgcggcgaagtggtcggcgcggtgagtattcaacatcaggcgctgccgagttgtcttgtcgataaacttggtgcgctcgactatctgttcgtcagctcaaaaccctttgccgaaaaatatttccctaacggcgtaacgcgttcggcattactgaaagcgccagtggtcgcgtttgaccatcttgacgatatgcaccaggcctttttgcagcaanacttcgatctgcctccaggcagcgtgccctgccatatcgttaattcttcagaagcgttcgtgcaacttgctcgccagggcaccacctgctgtatgatcccgcacctgcaaatcgagaaagaactagccagcggtgaactgattgacttaacgccagggctatttcaacgccggatgctctactggcaccgctttgctcctgaaagccgcatgatgcgtaaagtcactgatgcgttgctcgattatggtcacaaagtccttcgtcaggattaatccatcaaataatgcctgatagcacatatcaggcgttatcctcacttctttttgtattccttgaatcacatcacaaaatagacaaatctcaggcggcaaaaaacgacgtctgaatgcattttttttgctggcgacaaacccacgtaaaaagctcaccgtaagcgcaaataccctcattttgattgcgttttacggagcaaataatgtctaacgagcaggagtggcaacagcttgccaacaaggaattgagccgtcgggagaaaactgtcgactcgctggttcagcaaaccgcggaagggatcgccatcaagccgctgtataccgaagccgatctcgataatctggaggtgacaggtacccttcctggtttgccgccctacgttcgtggcccgcgtgccactatgtataccgcccaaccgtggaccatccgtcagtatgctggtttttcaacagcaaaagagtccaacgctttttatcgccgtaacctggccgccgggcaaaaaggtctttccgttgcgtttgaccttgccacccaccgtggctacgactccgataacccacgcgtggcgggtgacgtcggcaaagcgggcgtcgctatcgacaccgtggaagatatgaaagtcctgttcgaccagatcccgctggataaaatgtcggtttcgatgaccatgaatggcgcagtgctaccagtactggcgttttatatcatcgccgcggaagagcaaggtgttacacctgataaactgaccggcaccattcaaaacgatattctcaaagagtacctctgccgcaacacctatatttacccgccaaaaccgtcaatgcgcattatcgccgacatcatcgcctggtgttccggcaacatgccgcgatttaataccatcagtatcagcggttaccacatgggtgaagcgggtgccaactgcgtgcagcaggtagcatttacgctcgctgatgggattgagtacatcaaagcagcaatctctgccggactgaaaattgatgacttcgctcctcgcctgtcgttcttcttcggcatcggcatggatctgtttatgaacgtcgccatgttgcgtgcggcacgttatttatggagcgaagcggtcagtggatttggcgcacaggacccgaaatcactggcgctgcgtacccactgccagacctcaggctggagcctgactgaacaggatccgtataacaacgttatccgcaccaccattgaagcgctggctgcgacgctgggcggtactcagtcactgcataccaacgcctttgacgaagcgcttggtttgcctaccgatttctcagcacgcattgcccgcaacacccagatcatcatccaggaagaatcagaactctgccgcaccgtcgatccactggccggatcctattacattgagtcgctgaccgatcaaatcgtcaaacaagccagagctattatccaacagatcgacgaagccggtggcatggcgaaagcgatcgaagcaggtctgccaaaacgaatgatcgaagaggcctcagcgcgcgaacagtcgctgatcgaccagggcaagcgtgtcatcgttggtgtcaacaagtacaaactggatcacgaagacgaaaccgatgtacttgagatcgacaacgtgatggtgcgtaacgagcaaattgcttcgctggaacgcattcgcgccacccgtgatgatgccgccgtaaccgccgcgttgaacgccctgactcacgccgcacagcataacgaaaacctgctggctgccgctgttaatgccgctcgcgttcgcgccaccctgggtgaaatttccgatgcgctggaagccgctttcgaccgttatctggtgccaagccagtgtgttaccggcgtgattgcgcaaagctatcatcaatctgagaaatcggcctccgagttcgatgccattgttgcgcaaacggagcagttccttgccgacaatggtcgtcgcccgcgcattctgatcgccaaaatgggccaggatggacacgatcgcggcgcgaaagtgatcgccagcgcctattccgatctcggtttcgacgtagatttaagcccgatgttctctacacctgaagagatcgcccgcctggcagtagaaaatgacgttcacgtagtgggcgcatcctcactggctgccggtcataaaacgctgatcccggaactggtcgaagcgctgaaaaaatggggacgcgaagatatctgcgtagtcgccggtggcgtcattccaccgcaggattacgccttcctgcaagagcgcggcgtggcggcgatttatggtccaggtacacctatgctcgacagtgtgcgcgacgtactgaatctgataagccagcatcatgattaatgaagccacgctggcagaaagtattcgccgcttacgtcagggtgagcgtgccacactcgcccaggccatgacgctggtggaaagccgtcacccgcgtcatcaggcactaagtacgcagctgcttgatgccattatgccgtactgcggtaacaccctgcgactgggcgttaccggcacccccggcgcggggaaaagtacctttcttgaggcctttggcatgttgttgattcgagagggattaaaggtcgcggttattgcggtcgatcccagcagcccggtcactggcggtagcattctcggggataaaacccgcatgaatgacctggcgcgtgccgaagcggcgtttattcgcccggtaccatcctccggtcatctgggcggtgccagtcagcgagcgcgggaattaatgctgttatgcgaagcagcgggttatgacgtagtgattgtcgaaacggttggcgtcgggcagtcggaaacagaagtcgcccgcatggtggactgttttatctcgttgcaaattgccggtggcggcgatgatctgcagggcattaaaaaagggctgatggaagtggctgatctgatcgttatcaacaaagacgatggcgataaccataccaatgtcgccattgcccggcatatgtacgagagtgccctgcatattctgcgacgtaaatacgacgaatggcagccacgggttctgacttgtagcgcactggaaaaacgtggaatcgatgagatctggcacgccatcatcgacttcaaaaccgcgctaactgccagtggtcgtttacaacaagtgcggcaacaacaatcggtggaatggctgcgtaagcagaccgaagaagaagtactgaatcacctgttcgcgaatgaagatttcgatcgctattaccgccagacgcttttagcggtcaaaaacaatacgctctcaccgcgcaccggcctgcggcagctcagtgaatttatccagacgcaatattttgattaaaggaatttttatgtcttatcagtatgttaacgttgtcactatcaacaaagtggcggtcattgagtttaactatggccgaaaacttaatgccttaagtaaagtctttattgatgatcttatgcaggcgttaagcgatctcaaccggccggaaattcgctgtatcattttgcgcgcgccgagtggatccaaagtcttctccgcaggtcacgatattcacgaactgccgtctggcggtcgcgatccgctctcctatgatgatccattgcgtcaaatcacccgcatgatccaaaaattcccgaaaccgattatttcgatggtggaaggtagtgtttggggtggcgcatttgaaatgatcatgagttccgatctgattatcgccgccagtacctcaaccttctcaatgacgcctgtaaacctcggcgtcccgtataacctggtcggcattcacaacctgacccgcgacgcgggcttccacattgtcaaagagctgatttttaccgcttcgcccatcaccgcccagcgcgcgctggctgtcggcatcctcaaccatgttgtggaagtggaagaactggaagatttcaccttacaaatggcgcaccacatctctgagaaagcgccgttagccattgccgttatcaaagaagagctgcgtgtactgggcgaagcacacaccatgaactccgatgaatttgaacgtattcaggggatgcgccgcgcggtttatgacagcgaagattaccaggaagggatgaacgctttcctcgaaaaacgtaaacctaatttcgttggtcattaatccctgcgaacgaaggagtaaaaatggaaactcagtggacaaggatgaccgccgatgaagcggcagaaattatccagcataacgacatggtggcatttagcggctttaccccagcgggttcgccgaaagccctacccaccgcgattgcccgcagagctaacgaacagcatgaggccaaaaagccgtatcaaattcgcctgctgacgggggcgtcaatcagcgccgccgctgacgatgtactttctgacgccgatgctgtttcctggcgtgcgccatatcaaacatcgtccggtttacgtaaaaagatcaatcagggcgcggtgagtttcgttgacctgcatttgagcgaagtggcgcaaatggtcaattacggtttcttcggcgacattgatgttgccgtcattgaagcatcggcactggcaccagatggtcgagtctggttaaccagcgggatcggtaatgcgccgacctggctgctgcgagcgaagaaagtgatcattgaactcaatcactatcacgatccgcgcgttgcagaactggcggatattgtgattcctggcgcgccaccgcggcgcaatagcgtgtcgatcttccatgcaatggatcgcgtcggtacccgctatgtgcaaatcgatccgaaaaagattgtcgccgtcgtggaaaccaacttgcccgacgccggtaatatgctggataagcaaaatcccatgtgccagcagattgccgataacgtggtcacgttcttattgcaggaaatggcgcatgggcgtattccgccggaatttctgccgctgcaaagtggcgtgggcaatatcaataatgcggtaatggcgcgtctgggggaaaacccggaaattcctccgtttatgatgtattcggaagtgctacaggaatcggtggtgcatttactggaaaccggcaaaatcagcggggccagcgcctccagcctgacaatctcggccgattccctgcgcaagatttacgacaatatggattactttgccagccgcattgtgttgcgtccgcaggagatttccaataacccggaaatcatccgtcgtctgggcgtcatcgctctgaacgtcggcctggagtttgatatttacgggcatgccaactcaacgcacgtagccggggtcgatctgatgaacggcatcggcggcagcggtgattttgaacgcaacgcgtatctgtcgatctttatggctccgtcgattgctaaagaaggcaagatctcaaccgtcgtgccaatgtgcagccatgttgatcacagcgaacacagcgtcaaagtgatcatcaccgaacaagggatcgccgatctgcgcggtctttccccgcttcaacgcgcccgcactatcattgataattgtgcacatcctatgtatcgggattatctgcatcgctatctggaaaatgcgcccggcggacatattcaccacgatcttagccacgtcttcgacttacaccgtaatttaattgcaaccggctcgatgctgggttaatggtttgtcccgtcacgatcttcagcaatatgctgaagcatcgtggcggtataacgatgatttctgattgaataaagatattcctgcatatacatcggcctgtgcggcgcatcaaaatatttcagcgttgccggattcaccagtcgccaggcaaaatgcgggatcaccgtcagaaaatgtccgcgctccacggcgctgattttggccataaaactgtagggacgataaataatggtgggattgatcccacaaggtcgcatattcgcatcaatcattgcttcgaagttagcccggttttgaaagcgcatttgtagctagggcagctcctgaagcagctcttgctcttgacgctcttcataacggcgagaaacgagaaagttcaatcgcagcggtggtaattcactgatagtcaggttttccagttcctgaactcgtgcagatacatgctgtggggagataataaaatctaactgacggtcaaaaagattatcgataacgccgttttcgctgaactcaactggctgggcggtcacgccttcatacttatctccgagactaatcaactgatcgaaaataattgtcggataagtattatctatgccaatcacaatttctcgtgaacgacgccctgagttatggatttcattatcaatcgcagaaagtcgttgataaaccgggaacagtttttgatacagttcctgaccggctttattgaggctgatattattatctttgcgggtaaatagcgtatagccaatttgttcttccagcgcggcaatgcttttaccaaatggcgaagccgtcatatggattttttctgccgcccgggcaatwttattggtttgcgctaataaaatgaaattgcgcatctttttcgaaataaaaatgtccatcccccctccccgcatccttgtccgcttaaccgtttcagtcagcctatccttgatgaaaccgcgagcaaagataggtgattacgtcatggttttacagaaaattacagaaaaaggaggcaatatcgggtaaaggcattagcccgacgaatacgtcgggctacaagtattattgtgctgcaggtgttttaacgggttgttgatccacaggttctaactggaagaccacatcgacctgatcatcaaactgaatagcggcctgctcgtaagtttcctgggcagacaccggcgcggcatcggctttcatcatccgcaccattgggctgggctgatagttggaaacatggtagcgcacgctatataccggccccagtttacgatgaaagccgttcgccagttcctgcgcctgatgaatcgcgttatcaatcgctgccttacgcgctttgtctttataggcatccggctgcgccacgcccagcgacactgaacgaatttcgttaagacccgccttcagcgcgccatccagcaaggaattcagtttgtctaactgacggagcgtgacttccaccgttctcacagcgcggtagcctttcaggatacttttaccatcctgataatcataatctggctgggtgcgtaaattcgctgagctgatatcttttttcgcgatctgattgagttcaaggaaggaaatgtattgtgcgacgcgctcatctgcctgtttcttggctgtagcggcatccttcgcggccacgttaacttcaatcgcaagagtggcaatgtctggcaccgcatccacacttgccgtaccggaggtgacaatatgcggtccatccggcaattcgttagcctgcgctgccatcccgctaatacccattaatgccgccagggcgataactttgaacttcacgttagtctctccgtgttaattgacttgcccaaaattcaggacctctggaggcaagcttagcgcctctgttttatttttccatcagatagcgcctaactgaacaaggcttgtgcatgagcaataccgtctctcgccagctgcaaggctataaaccacatgacacatcccactaccagattgataatgcgctgtgattttgccgtgcgcaggcgcggtgccagccaggctgcgagaatagccagaccaaagaaccacaggaaagaggcgctaattgtcccgagcgcaaaccaacgttttggttngacgtcaagctgcccgccaaggctgcccagtacaacaaaagtatccaggtaaacatgcggattcagccaggtcactgccaacatggtggcgataattttccatctgccttgcttcaggacttcggcactagctaactcaatattactactcatcgctgttttaaaagcgccaaaaccataccacagcaagaagactacgccgccccaggtgaccagcgccagcaaccacggcgactgcatcaataacgcgctaccaccaaaaatccccgcgcaaatcaggaccaaatcgctgatagcgcaaagtaaggcaatcataatgtggtactgacgacgaatgccctgattcatcacaaaagcattttgtgggccgagcggcagaatcatagctgccccaagagcaagaccttgaaagtaataagaaaacacgttggatattccgaattaagtatctgatgcagagactatatcgcgggattgttattagcggaaattgataatattaattggcaatcagaataactaataagagagaggccagagagtattatctggcctcagcgttgattacgcagctttgtcttctttcacccgcttaaagttcacatccatttgcgggtacgggaagctgataccggcggcatcaaattcacgtttaatacgctccagcacatcccagtacacgttttgcagatcgccgctgttgctccagacgcggaccacgaaattaatcgacgatgcaccaagttcgttcaggcgcacagtcatttcgcgatctttcaaaatgcgatcttcagactggataatattggtcaggatctgcttaacctgatcgatatcggaatcatacgccacgccaataataaattcgttacggcgaactggctcgcgggagaagttaataatatttccggcaataattttaccgttcggaataacgataattttaccgtctgcagtacgcatggtggtggagaaaatctgcacactcagcacagtaccggctacgccgccgaggtcaacatattctccggcacggaacgggcggaacatgacaagtaacacgccagcggccaggttagaaagtgacccctgcaaagccagaccaacagctaagcctgcggcaccgagtacagcaatgactgacgctgtttgtacacccacgcgtcccagggctgcgattagcgtaaaggcgataataccgtaacggactaatgcagaaagaaaatcagcaacagtggcatcgattttacgggagatcatcaggcgattcaccgcgttggaaatcatccgcgcgataatcaaaccaacgatgatgatcgcgagtgccgccacgatgtttactgcataacttagcagcagcgcctggttagctaccagccagcttcccgcgccgtttatgctatcgacaacattcaaatcttccattcaatattccttttcaactgactcaaaatggagaaatacactccgccgccttatgacgggcagtctgacaagggtaaacaataaagcataattttgccaaatagatcacagatttctcatctgaatcaccttgcttttggcaaaaaaatccccgcagagcggggctcagacagatatcaatgtgcgctttgtcatgccggatgcggcgtgaacgccttatccggcctacaaaaacctgcaaattcaatatattgcaggatacgtgtaggcctgataagcatagcgcatcaggcaattttgcttttggcgaaaaaaagacccgcagagcgggccttgagataagcagaaaggaatgacttacagaacgtcgancgcgttcagttcctggaatgctttttccagacgagcgatcatcgaagtctgaccggcacgcagccatacgcgcggatcgtagtatttcttgttcggctgatcttcgcctttcgggttacccagctgaccctgcagataagcttcgttcgctttgtagtagttcagaacgccttcccaggttgcccattgggtatcggtatcgatgttcattttcactacgccgtagcttacggagtctttgatttcctgagcagtagaaccggaaccaccgtggaatacgaagttcaggctgttgtgcggcaggttgtgtttcttagaaacatattcctgagaatcacgcaggatggtcggagtcagaaccacgttacccggcttgtaaacaccgtgtacgttaccgaaggacgctgcgatggtgaaacgcgggctgattttgctcagttcggtgtatgcgtaatcaacgtcttccggctgggtgtacagtgcagaagcgtccatgtggctgttgtccacgccgtcttcttcaccaccggtgcaacccagttcgatttccagagtcatgccgattttggacatgcgctccaggtatttagagcagatttcgatgttctcttgcagagattcttcagacaggtcgatcatgtgagaagagaacagcggcttaccggtagctgcgaagtgtttttcacccgcgtccagcagaccgtcgatccacggcagcagtttcttcgcgcagtggtcagtgtgcaggataaccggaacaccataatgttcagccatctggtgaacgtgatgcgcaccagagatcgcgcccaggatagcagcaccctgcggaacgtcagatttcacgcctttaccagcgataaaggaagcaccaccgttggagaactgaacgataaccggcgctttaactttagcagcagtttccagtacggcgttgatggagtcagtaccgacgcagtttactgctggcagtgcgaagttgttttcttttgctacctggaaaactttctgtacgtcatcaccagtgattacgccaggttttacgaaatcaaaaatcttagacatgtctcttgtcctgtatcgtcgggccttatactcgtcatacttcaagttgcatgtgctgcgtctgcgttcgctcaccccagtcacttacttatgtaagctcctggggattcactctcttgtcgccttcctgcaactcgaattatttagagtatgaaaaaatgcgtgctctaaaagcgcgctgaaacaagggcaggtttccctgccctgtgattttttacttcttagcgcgctcttcgagcatcgctactgcaggcagtactttaccttccacgaattcgaggaatncgnnnncgccagtggagatgtaggagattttgtcagcaatgccgaacaggtcgattgctgccagagtgtcgccgccgccagcgatggagaacgcttcgctgtctgcgatagcgttagccacgatttcagtacctttgcggaagttcgggaattcgaacacgccaaccggaccgttccacagaatggttttcgcattcttcaggatttcagccagttcctgagcggaagcatcaccgatatccaggatctgctcgtcagctttcacgtcgttaacagatttcagggtagccggagcggtttcagagaactcggttgctacgcgaacatcagacggaaccgggatgttgcaggtggtcagcagacgttttgcttcgtcaaccaggtcagcttcgtacagggatttacccacatcgtggccttgtgccgcgataaaggtgttagcgataccaccaccaacaatcagctggtcagcgattttagacagggagtccagaacggtcagtttggtagatactttagaaccaccaacgatagccaccatcgggcgagcaggttctttcagtgctttacccagcgcgtccagttcagctgccagcagcgggcctgcgcacgcaacgtcagcgaatttaccgataccgtgagtagaagcctgcgcgcggtgagcagtaccgaatgcgtccattacgaacacgtcacacagtgcagcgtattttttggacaggatttcgtcgtctttcttctcgcctttgttgaagcgaacgttttccagaacaaccagttcaccttcagcaacgtcaacgccgtcgaggtaatctttaaccagacgaaccgggttagacagtttgtctttcaggtagttaacaaccggcagcagagagaattcttcgttgtactcgccttcggtaggacgacccaggtgggaagttaccatcacttttgcgccttgtttcagggccagttcgatggtcggcagagaagcacggatacgcgcgtcgctggttactttcccgtcttttactggtacgttcagatccgcacggataaatacacgtttcccagcaagatccagatcggtcatcttaattacagacatggtgaatcctctcgttgattctaaaagttttgcagacgctgcttgcgtcttacctgaaagcaacagtagccatagctaacgtcgtgtcgagcattcggttagcaaagccccattcgttatcgcaccagaccaacgttttgatcaggtgtgcgccactgacccgggtttgggtgccatcgacaatggcactgtgcggatcgtggttaaaatctacagagaccaacggcaattccgtatagtcaactataccatgaaatgcaccttgtgctgctttttgcagcaacaggttgacttcattggcttttacaggtttcttcaccgtcacgcttaaatcgattgccgtcacatttatggttggcacacgtaccgcaatcgcttcaaagcgatcgttaaattgcggaaaaaatcgtgtgataccggcggccagtttagtatcgaccggaatgatcgactggctggctgcccgggtgcgacgcaggtcaggatggtatgcatcaataacctgttgatcgtgcatggcggagtgaattgtggtcacagtgccggactcaataccgtacgcatcatctaacaatttgatgacgggaattatgcaattcgtggtacaggaagcgttagaaacgatgcggtgctccgcacgaagttgatcctgattgacgccgtaaacaacggtcgcgtcgagatcgttactgccaggatgtgaaaagagcacttttttagccccggcggcaatgtgcgcttcgccatgctcgcgggagccatatacgccggtgcagtcgaggactacatcaacgccaagttcacgccaggggagcgattgcagtgaacgttcatgcaatacgcggatggcgtcatcaccaacaaaaagttgatcgcgttcctgtcgtacttcccatgcaaaacggccatggctggtgtcgtatttcaacaaatgcgccatgcccgcagcatccgccagttcgttgattgccaccacggtaatttccgcccggcgtccggattcatacaaagcacgaaccacattacgcccgatgcgaccgaagccatttatcgctacgcgtacggtcatagatctcctgcaaggttttccctgagcaaatttgccagacagagtaatccagcaaatcgtccggggaaaccttacctgtcgcaaactgcgactgattggttaattgtcgaacacttaatcgactgaaacgcttcagctaggataagcgaaacgtggaataaaaggaatgattgtccagtcaaagaaaacaattatctgacttacgtcacgttttcagccccgcccctgtggaatttattccactttgcagaatcacgaataagcgtagcaaaatcttttcgttgtgccgtcacaaaccctgacttatatcagaatatgactgatgcagcgtcgatattatccgtaatacgtccgagtttcggagtactccaatgatgacattgccctacccatattcttcctccgcacgcttttacgcactgcgcctcctccccgggcaggaagttttttcccagctacacgcttttgcacagcagcagcaacttcatgccgcctggattgcaggctgtaccggtagcctgactgacatcgccttgcgctatgccgggcaagaaggcaccacgctcctgaacggtacattcgaagtgatctcactaaacggcacgttggaacagagtggtgagcatcttcatctctgcgtttccgatccacacggcacgatgcttggcggtcatatgatgcccggctgtaccgtgcggaccacgcttgaactggtgatcggtagccttgaggaactggcgtttagccgccaaccttgcgcgctttctggttacgacgagttgcatatttcccccgttaaataactactttcagagaggttttcttatggcgcgtagccacttttccagtcaggcactggtgttgatcgttatatctatcgccatcaatatgatcggcgggcaactggccagcatggtcaaattacctatatttctcgactccatcggcacacttattagcgcggtactgcttggtccggtgatcgggatgctgaccggcttactgaccaatttactctggggattactgaccgacccgatcgctgccgcttttgcccccgtcgcgatggtcatcggcctggtcgccggttggctggcgcgagcgggttggtttcgcaccctgccaaaagtcgttgtcagcggcgtgattattacgcttgcggtaacggtcgtcgctgtaccgctgcgtactgcgctgttcggcggtgtcaccggtagcggagccgatttgttcgttgcctggatgcactcgatggggcaaaacctggtggagtcggtggcgattacggtgataggcgcgaacctggtcgataaaactcttacagcggtgattgtctggcttttactgcgccagctgccgattcgcaccacgcgccattttccggcaatggctgccgtgcgctaaatgcatccatttacctcattaacactatgggcattggcggcctgcaccacgcttatcctgcccgcgcagaccattttgccgatctatagcgcggcgacctttttttgccttattgcgctaaaggccacgcggcggcgggcaaaatatgtcgtctggctgatgttctcgctgggagccgggctgtggctggtacacggtggctggctaacagaatggctaagcggcacgccgcgttcgccggagcgttggacgcatgctattacgctctggttgcggattctggcgattgtttcaacctcacagttgtggatgcagtacgtccccgtgcaatgttttatccgcgctctgtttgcttctcgcctgccgccgggcgtcgcttatctgtttgccgggccgttattggtcgttgagcagttaaaacggcaattagcgattattcatgaagctcagcgtgcccgcggcntgccgctggatgagggctggtatcagcgtttacgtgcgatgcccgcgttaactattccgctaacacacaatgcgctaaacgatcttgctgtccgtggtgcggcgctggatatgcgggcatttcggatccacaaccgacgaacaacgttgtgggcaccagccgatagcaccctacaacgcgtagcgcgttacaccatgatcttgctgatgctgacagaattcggagcgtggatatggttacgttagaacagttccgttattgcccgacacactcaacgcatcctccgttctgttatgactttcactatgtcaaaccggggatggtcgccatctttggtgacaacggcagtggcaaaagtacgctggcacagctgatggcgggctggtatccggactttctgccaggagagataacaggcacggggacgctcctcggtacgcccattgggcatctcccgcttaatgaacaatccgccaccatccagctcgtccagcaatcgccctatttgcagctctccggctgtacctttagcgtggaagaagaagttgcctttgggccagaaaatctgtgtcttgctgaagcagagattatggcgcggattgatgccgccctgactctgaccgagtgccagccgttgcgccatcgtcacccggcaacactctccggtggagagacacagcgcgtggtcatcgcctgcgccatcgcgatgcagccaaagctattaattcttgatgaagcctttagccgcctgacgccgcaggccagcgaaatgctgttgcagcgcttacaacactgggcgtttgaacgtggttcgctgattattctttttgaacgtcatcgcacacctttcctgaactactgccagcaagcgtggcaattgcaaaacggagcgctccagccactatgttaacgttaaatcagatatcttatcgctggcctggcgcggcaacggattgtctttgcgacatttctctgcaactcaaacaaggtgaatggttggcgttgaccggcgacaatggcgcagggaaatcgacgctgttacgagtaatggcaggtcttcttacgcccacagccggtacggttatgctgcaacaacaggcgatgaaaaacctgaaaaaccgccagcgcgcggcaaagattggcgtactgtttcaggaagcggaaaaccaactttttcacagcaccgtcgctgacnnnnncgcatttggtttgaaactgcaaaaatgcccggcggatgaaatcactcaacgtacccatgctgccctgcaatgttgtcagttagcagacactgccagcgcgcacccgttggatctgcatagtgcgcagcgacggatggtcgccgtcgcctgcctggaagcactctctccgccactattgctgctggacgagccgagtcgggattttgacgaaaattggttgagcgtgtttgaaagctggctggagaagtgccgccagcgaggcacgagcgtcgtagcaatcagtcatgacgccgcatttacccggcgtcatttctctcgtgtggtgcgactggaagatggtctaatcaggaacattaatccaccagacgatattcacccgtagcggtcatcattaaggtcaaatttgcaggcagactntcttccagcacccggcgaacattcggcccgtcggtacggtcataaaaagcttctgcgtctgccagcgataaccctcccgccagcttgcgccccaccagtcgttcccgcaacgcagtagctggcgcattgataaagatcgagaaatcacaaaattgcgctagctggcgccagttatcgtcatccagcaatagccagtttccttcgacgatgattattggtgcggtaacgtgcaacgcatcttcaacaggatcatgcttttgtcgatcgtactgcggccacgtacaatccccttccacgacctggcgcagattttccgccagtttcgcaacgtcaaatgtctctggtgcgcctttgaaggggcgcnnnnnnngcgcatccagccagctattgtaatggtgaaaaccatccatcgggagcgtctgaatagcgggcagctccgggtcttgttgcgcgagatatgccctgaaggtggttagggtagatttacccgtccccggcggagcgcaaagaaaaaccacggttcggcgctgcggatttaccgtctgtaaggccgccagcatacgcagcaacggtttatgcacgcgttctatctcttcatcatggtactgcgcttgcacgttcagcccattcaccgttaattcaattttcacggcgttaattcctttaaggtggtcgttactgccagcgtcagcgccgttttgaccattccgctaaaacgcgcctctgaccagacggcgaaatcggcgaacttcatcgctttcaacgcgtcatagagcgtcgcattgcaggttatgctattgacgttgctgataaaatcccaagtcatgtcatcggcaaatccgagcgtttcatcctgttctttcaggtaatgccagtactgggaaaaatgcgtgatatcggcgtacagccatttatccattttccccagcgcataaatcaaacgcagtgcaacatcaatatcgtcaagcgggccgctttgggcgagtaacggcttcactgcatattcgacgctctcttcatcgttatcgacaaacagcgacggcagaaactggcgtatcccctggagcaaaatagaatgcgcagttttcataaatgaaaataaattgtcctgtgcatccagttgctcaagcacatcatcttctgtcagcgtcgccattggtcttccgatagatcaccatcaatacagggagtctattatattacacgtttggtccgcgccgccgatcagtaatgtctgcgtccgcactccattcgccgtctgttggataccgttcaccaactcgccgcccgtgacgcccgtagcgctaaagaggatatcgttcccccttaccagtacatcgagcgagtacacacggttaacgtcaacacccattgccttgcaacgcttgcgctcctgctctgcaatctgccgattttccgtgtaatcccctttggcctgacaaaagtcaatcagctcggcctgcatattcccgcctaatgctttaacggcacaggcagaaatcacgccttccggcgcaccgccgatggtgtacatcacatcgtaaggattatcctgccagcaggtcagcacgctggcggcgacatcgccatccggcagggcaaaaaccttcacgcccagctgtgttgcttcttcaatcgcggcactcagacgcggtttatccagcgtaaccatgcgcagcttgtccagcggtttacctaacgcccgcgccacgtcacgcaagttgtccgccagaggcaaagacagatcaatcgccccggcagccagtcgattaacaaccagctttttcatatacatatcgggcgcatgtaacaggctatctcgaggggcgaaagccatgaccgccagcgcattgctctgccccatcgccaccatccgcgtgccttcaatgggatcaaccgcgatatcgacttctggcccatcgcctttgcccacctcttcgccaatccacagcatcggcgcatggtcaatttctccttcgccgataaccactcgtccacgaaaagcgacgtcgtttaatgcctggcgcatcgcggtgaccgccaggccatcaattttatttttgtcgccacatccggtttgcggccaggcagccaacgctgcctgttccgtaacgcgaaataatggccacgccagggacatcattgcgcggcntccccgatatcaacgccaaattgtgccagcagatatttctcggcctgttcattccagatgccgtgcgtttcctcaaccagccgcgccaactctttaaacagcggatcggttttgcctttttcggcaaaatcggcaatggctgtgagcggcatagtcacgccgttataaatgagttttttaccgccagggatatccggcagattgagcacggtttctggcaccgcatccaggccaccgatatgggtcaccataaacgacggctgtaactgccctgtggcgctaagggcaatcgcctctttcatgtcgtccgttgaaccgccggatgtaccgacgacgtgcgtgctgttgtaatgaacgttgtagaaattaaacggcactttgaagtttttatccgtcggcccggcaaagaagttcagacagccatcttccgccagtaattcatcagccatctcaacgacagcagacaccgccgcataaacaaaaatgtcatcgaacccggcatctcctgtcagcgcccgcagcatctggacaggatcgctcatccctttggtattcacatacaccagctcaatgcctttactggccgccagttccaccggcagcagcttctgtacctgcgccagacgtttgtcgtcgatatcgaccaccaccacccgcgacggttgtatgccgccgttaatggcgtaatcgatagcgccaatgcccatcggacctgcacacgccagcagtgcaatattgccgccaggtttgacgcccatgcgatgctcataaacatattgcgtggtgtgataattggcatgataagcgccaataatgcagcacataggctctgccagcgacgccgcagcaaaataagagccgtgatacggtaatacgcagcccaaattaatggcgatttcgggaataatcatataagtggcattgccgccaaaatattcgtagctgtagcccgctgaatatccgcttggtaaccccatcgccggttgcaatacaaaacgctggccttttttatatttgccagtgagatttttacccacttcgacaataaccccggcacattcatgcccggtaatgaccggatgattttctaaatcgtcgggtacgcgtttatgttcactaccgagtaacgccgctttccaggtggataaacagacgctgtcagaaatcacactcaccagtaattcattatcggtaatttctggcagttcaaattcgcgcagacggacatcccgcttgccataaatagcagcaactttggttttcatttttacctctgtaatcagtgtttatgttcngcggttaattgattaaataaagtgtcnagttttggatcgccaatatagttattaatcaatatcagtggtttatccgtcacacgtttcacgcgcccttccanactggcatgagtaacgacganatccgcatccgcaggcacgttttctatggcgtaatgttttacttcaattgccagccccgctttttccaggcgtttacggaaggtggtcgcgcccatcgcactggagcccatccccgcatcgcaaacaaaggcgatacgcttaaccctgcttaacgagaatgcaccctcttgtttcatcgccttaaccgcattggctgactgagcaaactcatcttcgctctccgtttccaccgttttttccatcttcagtatcagcgaagtgatagcaaaggacaccagggtacctaccgtaacaccggcaattgtcgccaggaacgaacctttcggcgtcagcgccaggtaagcaaagatagaccccggacttgggccagccaccagaccaccgtccagtaagttaaacatccaggtgccagacataccgcccgcaatcatggcaataatagtcagcggcttcatcagcacatatgggaaatacagttcgtggatcccaccgaggaagtgaataatcatcgccccgggcgcagaacgtttactcatccctttaccaaacaaggtaaacgccagcagcagccccaggcccggacctgggttagaggccaccataaagaagatggatttaccgttaaccgaagcctgttgcattcccagcggataatagacgccctgatcgatcgcattattaaggaaaagcactttcgccggttcattgatgactgacagcagaggcagataacccgcatgtaccagcgcctcaatacactctttgacgaaagtattggcaattaacaccgccgggccgatcacttcaaaacccagcaggcaaaggagcatccccgcgatacctaatgagaagttattgataaccatctcaaaaccggcaggtatgcgtttttccagtgccttatcaacatattttatgaccagaccaccgagcggccccataatcattgagccaaggaacatcgggatctctgcgccgacgatcacaccaatagtacctattccgcccatgaccgcgccgcgtttaccgccgaccagatgaccaccggtagaaccaatcatcacgggcaataaataggtaatcatcgggccgacaattttggcgaaatgttcgttaggcagccaaccggtgggaataaataacgcagtaataaaaccccaggcaataaaagcaccaatattggggatgaccattgcagtcaaaaagcccccaaaagcctggacctttgcacgagcagacttgttttccataatattatcctgtagaggagagagtaattatccgcggctgataatgtccgctaattgtttttctgatgatgctgttaagagttgttcgagtatttcttcttcgcacagtaattcacttaacgcctgaatagcgccaatgtgcgaatcggcatcggcagcagagagtccgatgagtaatttaattggttcgtcattccccggaaaataaacaccttgttcaagtaatgtcaaagacatcccggttttaagcgccccacattccggtcgcgcatgaggcattgccacgcctggtgcgagaatataataagggccattgttaatggtggaatctttaattgcctgaatgtaattctcgctgatatagtttttatccagcaatgataccatcgagaaatcgatagcttcctgccaatcttttgctgaatgtataactgagattgatgattctggaaaatagtcactaagccgcataaattatccttattttatttttagggtacnnnncggcggtaaaaataaaatactcgtgcggtttaatgaaagcaattgagcagggaaaccggtgttttgaaaacagtgaattattaatttcttatataacattgagttatagatataacaacaaatgtcaacacgcatatcgtgatgcatattacataattgatatttattgcatataaatatttgtgatctacaacacgctttatctattgcttgtccgcaaacggacatatcaaggtaataaaaaaggtcgccgaagcgacctttttacccgaaatgctagttacagcagttcttttgctttcgcaacgacgttgtcgacggtgaagccgaactcttcgaacagcaactctgccggagctgactcaccgaaggtggtcataccgatgatagcgccattcaggccaacatacttgtaccagtagtcagcaatacccgcttntaccgcaacgcgtgcagtaaccgctttcggcagtacggattcacggtaagccgcatcctgcttgtcgaatgcatcggtagacggcatggaaaccacgcgcgccttcacgccttcggcagtcagtttttcgtaggcggcaacagccagttcaacttccgaaccggtcgcgatgaagatcagttccggctgaccagcacagtctttcagcacataaccaccgcgcgcgatgtttgccagttgctcttcagtacgttcctgctgcgccaggttctgacgggagaggataagcgcggtcggaccgtcctgacgctcaacaccgtatttccacgcgaccgcggattcaacctggtcacacggacgccatgtagacatgttcggggtcacgcgcagagaagcaacctgctcaaccggctggtgagtcgggccatcttcgcccagaccgatggagtcgtgggtgtaaaccataacctgacgctgtttcatcagcgcagccatacgtacggcgttacgtgcgtattcgacaaacatcaggaaggtggaggtgtacggcaggaagccaccgtgcagggagataccgttagcaatcgcggtcataccgaactcgcgaacaccgtagtggatgtagttacccgcagcatcttcgttgattgctttagaaccagaccacagggtcaggttagacggtgccaggtcagcggagccgccgaggaattccggcaacagcgggccgaacgcttcgatagcattctgagacgctttacggctggcgattttcgccggattagcctgcagtttagcgataaactctttcgctttggcgtcgaagtcagacggcatttcgcctttcatacggcgggtaaattcagccgcttcctgcggataagctttcgcgtaagccgcaaacttctcattccatgcagattctttcgcctggcctgcttctttcgcatcccactgcgcatagatttcagacgggatttcgaacggtgcgtatttccagcccagctgttcgcgggtcagagcgatttctgcatcacccagcggcgcaccgtgggagtcgtgagtaccggctttgttcggggaaccgaaaccgatgatggttttgcacatcagcagggacggtttgtcagtcactgnnnnngcttcttctactgcgcgtttgatggatgctgcgtcatgaccgtcgatgtcgcgaataacgtgccagccgtaagcttcgaaacgcattgcggtgtcgtcggtgaaccagccttcaacgtgaccatcgatagaaataccgttgtcatcgtagaacgcaatcagtttacccagcttcagcgtacccgccagagagcaaacttcgtgggagatgccttccatcatgcagccgtcgcccatgaaggcgtaggtgtagtggtcgacaatgtcgtggcccggacggttaaactgcgccgccagcgttttttctgcaatcgccatacctactgcgttggcaataccctgccccagcggaccggtggtggtttccacaccagcggtgtaacccacttccgggtggcccggagttttagagtgcagctgacggaagtttttcagttcttccatcggcagatcgtaaccggtgaggtgcagcaggctgtagatcagcatggagccgtggccgttggacagcacgaagcggtcacggtcagcccaggacggattctgcgggttatgtttcaggaaatcacgccacaggacttcggcaatgtcagccatacccataggggcacccgggtgaccggatttggctttctgtactgcgtccatgctcagcgcacgaatagcattggcaagctctttacgtgaggacattttgactccagatcggatgatgaagggcacgcccttaacgacttgacgacagcgcgttttgggctacgccggaaaatttgccaacaatttaccgcaagccgcgcgtcatgtacatggaacatccttttgccgcttcagaaatctctggatcatgctcgcatgttgcgcaatctactcgcccgtccgctgcgcttttccttatactgagactgagcgtcggttcacctgcaaacggcgcatttttagaataatcctgaccttgtgcggaagaaaaaacatgaaaattcgcgccttattggtagcaatgagcgtggcaacggtactgaccggttgccagaatatggactccaacggactgctctcatcaggagcggaagcttttcaggcttacagtttgagtgatgcgcaggtgaaaaccctgagcgatcaggcatgtcaggagatggacagcaaggcgacgattgcgccagccaatagcgaatacgctaaacgtctgacaactattgccaatgcgctaggcaacaatatcaacggtcagccggtaaattacaaagtgtatatggcgaaggatgtgaacgcctttgcaatggctaacggctgtatccgtgtctatagcgggctgatggatatgatgacggataacgaagtcgaagcggtgatcggtcacgaaatggggcacgtggcattaggccatgtgaaaaaaggaatgcaggtggcacttggtacaaatgccgtacgagtagctgcggcctcggcgggcgggattgtcggcagtttatctcaatcacaactcggtgatctgggcgagaaattagttaattcgcaattctcccagcgccaggaagcagaagccgatgattattcttacgatcttctgcgccaacgcggcatcagcccggcaggtcttgccaccagctttgaaaaactggcaaaactggaagaaggtcgccaaagctcaatgtttgacgaccatcctgcatccgccgaacgcgcccagcatattcgcgatcgcatgagcgcggatgggattaagtaaagcctggtggtgtcgaacgtaggtcagataaggcgttcacgccgcatctgacatgaatggcacatttgttaccttgtgcgcattgccggatgcgatgctggcgcatcttatccggcctacgggtgncgaacgtaggtcggataaggcgttcacgccgcatccgacattaatggcacgttttacccgtgcgcatcgcatctggtgcttactcgccctttttcgccgcctgaatatacagcatttccagcgccagcgttgccgctgccagagcggtgatttccgactgatcgtatgccggagccacttccactacgtccatcccaacgatgttgagatctttcaggccgcgtaccagtttaatagcgcgatcggaggtcagaccgccaattaccggcgtaccggttcccggcgcaaatgcaggatccaggcagtcgatatcaaaggtcaggtaaaccggcatatcacccacaatttgtttcacctgggcgataacgtcatccacgctgcgatcgttcacctggcaggcgtccagcacggtaaagccgttgtctttatcaaattcggtacgaataccaatctgcacggaatgattcgggtcgatcagaccttctttcggcgcggtatagaacatggtgccgtggtcaaattcacaaccgttcgcgtaggtatcggtgtgggcgtcaaagtgtaccagcgccattttgccgaaatgcttcgcatgagcacgcagcagcggcagcgtaacaaagtggtcaccaccgaaggagagcatacgcttaccggcagccagcagcttctcggcgtgcgcctgcagcttctcgctcatctcacgggcatcgccgaaagcatataccagatcaccacagtccacgacgttcagacgctcacgcatgtcgaaattccacgggaagcggttgtgttcccaggccagattcgtcgaaacctgacggatagctgccggaccgtggcgtccccccgcacgaccagaagtggccatatcgaacggcacaccagtaatcacccagtcagcatcgctgtcatacggctggaagttcatcggcaggcgtaaaaaaccaaaggcgttggaaaccagtgagttatcgtattgatgacctaaggtgctcatggatggactcctattacaaagtcgatataaaaaaacccttccgcgtcgttaggcccgacgaggaagggttggatttgcgaaacacaagtttgtgctaattatcgccttaaatgggcgaggcatcaagcgaggttgctatttccgacacggtggcggcgcatagccattgttatctgccggaaaggcttgtccagagcacggtggcagcgcgttttgcgcctggccttgtaattcaaaggcggcaaagccgattacaccggtattacgcacatcgccttgcgccgaattggctgcgtaggaatcagcaacgttggcgaactgaaaagccgcttcggtatgtttatctttgcggaatcctttaatcgctaacgaatctccggcattcacaatatagccgttgttattcagcgaaccttgcttgccgttcagcacatccaggccatcaaccgtagcaacgatctcgtagttggtgttacgactgtaattacggacatataattgataattcattccgactctggcatggacaatatagcgtggttcattattagatgaatcataaacacgcgtaataggtagagaattaaaattaccatcgcgaatagcatattccagttcgttaatacgaatgctataaacgcgatcgtagccggaaggaacattagtcgaataactaataacgatcatctccgccggatcgcgccaggctcgctcagcagatacgccctgaaccgttgagtgcacatccccaccccaggcggtgccgacattgcccgatgcactgctattatactgcgcattactggaacaaccggccagcagcacgattaatgccaccaacgcgctgcgtactttccattttttcataaccgttccctctgcatttaattaatgcagcgattgtagggagattatttaataagaaaagcagctaaattatttttaagaatatataaaaagaaagcggaccgatttacgtaaataaatcgacccgccagcagaataatcttaattattcatcttcaagataggtataaccgtacaaacctgcctcgaactcttcaaggaactgttgttgcagttcagcatcaagatcggttttcttcacttgatcacggaactgagttaacagcgttttcggatcgagctgtacatattgcagcatgtccgccacggtatcgccttcgtcagacagttccacttctacactaccgtcagggaagacgaacacgtcaaccgcttcggtatcaccgaacaggttgtgcatgttgccgaggatctcctgatatgcgccgaccataaagaaaccgagcatcggcggattctctggatcgtactccggcataggcattgtcgtggcaataccatcaccatcgatatagtggtcgatagcaccgtcagagtcacaggtaatatccagcagcacagcgcggcgttccggcacttgatccagcccttccagcggcagaaccgggaacaactggtcgatcccccacgcatccggcatcgactggaacagcgagaagttgacgtacattttgtccgccatacgttcctgcagctcgtcgataatcggacgatgagcacggttttgcggatccagctgcttttgcacttcatggcacatgctcaaataaagctgctcagcccatgcacgttcttgcaggctaaaggtgccggaagagtagccgatatgaatgtcgtgcagatccatctgactgtcgtgtaaccattcacgcagagaacggcgagttcccggttcgtgcatctcctgccaggtttcccacatgctttgcagcgnnnnnnnnncatcttctgcaggcgcggtcggcaccgtgtattcgttacgttccacgccgatgatattagacaccagcacggtgtgatgcgcagtcactgcacgacccgattcggtgattaccgtcggatgcggcagaccgttttcttcacacgcatcaccaatcgcccagatgatgttgttggcatattcattgaggccgtagttcaccgaacagtcggactgcgaacgagtaccttcataatccacgcccagaccgccgccgacgtcgaagcactgaatattgacgcccagcttgtgcagctcaacatagaaacgcgcggattcacgaacgcctgtcgcgatannnngaatattcgccatctgcgaaccgaggtggaagtgcagtagttgcaggctgtcgagacgcccggcttcacgcagggtttcaaccagttgcagtacctgagtcgccgccaggccgaacttcgatttttccccgccggaggactgccatttaccggagccctgcgaagccagacgtgcacgcacgcccagacgaggaacgacattcagacgttctgcttcatccagcacaatggcgatttctgacatcttctcaatgaccagatagaccttgtgccccatcttctcgccaattaatgccaggcggatatattcgcggtctttataaccattgcagacgatgacgctacgggtcatgccagcatgtgccagcactgccatcaactcggctttggaaccggcttccagacccagcggttcgcccgaatgaatcagggactcaatcacgcgacggtgctggttaactttgatcggataaacaaggaagtaatcgccgttatagccgtaggattcccgcgcacgtttgaacgcggcgttaatggaacgcaaacggtgctgcaggatctgtgggaaacagaacagtgcaggcagacgctgaccctgtgcttcacgagttttcactaactgcgcgagatcgacgcgagcttccgggacgtccgggtccgggcacacgctgatgtggcccagctcgttaacatcatagtagttattgccccaccaggcaatattgtaagtacgcagcatcttgctggcttcctgggagctcattgcaacctcctgcatggagcgtagtacaccgtgttcgcccgctgacgaaggcaaacccatagacatgtcgtcagacatagcgaacctcaaattattttattaagtgtaaaacagttaacgactatcgcagcctggaactgcgataacaacccataagcacatggattttccagcagtgaatgctgacgctccaactgcgcaaccggtttctttttcataacattattaagcacataaccgaacgtaagtgtgacagttcggcgaaaccacgagaaaactcttgtttttacaagagcgcccttgttcagtcctcagtaactgtaaccagctcttgaatcctgagaagcgccgagatgggtataacatcggcaggtatgcaaagcagagatgcagagtgcggggaacgaatcttcaccagaacggtgagacaggttaagcagcagacaacggttcattatttcgtatcacctccacggccgcctgttaagacgaacccacaagccaaaactctgatttcaacccggctggaagtggcaacacgaaagaaacgtcgtgtgctttttatttaagccgcgcgccgcgttttataccccacaatggcagaaaattgcaaaagataaatacgcagaatgccggcattgtcaggaaaaatttccagccacgtttttaacagaatgagacacgattcaaaaaaaagtggaaatcgggtgaagaattgacctaaaatagccatccagatgttaatccatccataccgattaacactcagactgccagtgtttttaacctgcagagtcgtggtaggatccgctaccacagaaaatccacacaacagtttgagctaaccaaattctctttaggtgatattaaatatggcaaaacacctttttacgtccgagtccgtctctgaagggcatcctgacaaaattgctgaccaaatctctgatgccgttttagacgcgatcctcgaacaggatccgaaagcacgcgttgcttgcgaaacctacgtaaaaaccggcatggttttagttggcggcgaaatcaccaccagcgcctgggtagacatcgaagagatcacccgtaacaccgttcgcgaaattggctatgtgcattccgacatgggctttgacgctaactcctgtgcagttctgagcgctatcggcaaacagtctcctgacatcaaccagggcgttgaccgtgccgatccgctggaacagggcgcgggtgaccagggtctgatgtttggctacgcaactaatgaaaccgacgtgctgatgccagcacctatcacctatgcacaccgtctggtacagcgtcaggctgaagtgcgtaaaaacggcactctgccgtggctgcgcccggacgcgaaaagccaggtgactttccagtatgacgacggcaaaatcgttggtatcgatgctgtcgtgctttccactcagcactctgaagagatcgaccagaaatcgctgcaagaagcggtaatggaagagatcatcaagccgattctgcccgctgaatggctgacttctgccaccaaattcttcatcaacccgaccggtcgttttgttatcggtggcccgatgggtgactgcggtctgactggtcgtaaaattatcgttgatacctacggcggcatggcgcgtcacggtggcggtgcattctctggtaaagatccatcaaaagtggaccgttccgcagcctacgcagcacgttatgtcgcgaaaaacatcgttgctgctggcctggccgatcgttgtgaaattcaggtttcctacgcaatcggcgtggctgaaccgacttccatcatggtagaaactttcggtactgagaaagtgccttctgaacaactgactctgctggtacgtgagttcttcgacctgcgcccatacggtctgattcagatgctggatctgctgcacccgatctacaaagaaaccgcagcatacggtcactttggtcgtgaacatttcccgtgggaaaaaaccgacaaagcgcagctgctgcgcgatgctgccggtctgaagtaatctttcttcacctgctttcaaaggccagcctcgcgctggcctttttcttttacctcaccgcggtggataggcgttcacgccgcatccggcaaaaaaaccgcctgcacaataacatcattcttcctgatcacgtttcaccgcaaattatcatcacaactgaaaccgattacaccaaccacaacagacaaagatttgtaatatttccatattattattcggttttcacagttgttacatttcttttcagtaaagtcttaattgcagataacagcgtttaatctatgatgatataactcaattattttcatgcacttaaatcataactaagataaatgttagtgtaagcgattacactgatgtgatttgcttcacatctttttacgtcgtactcacctatcttaattcacaataaaaaataaccatattggagggcatcatgcctgacgctaaaaaacaggggcggtcaaacaaggcaatgacgtttttcgtctgcttccttgccgctctggcgggattactctttggcctggatatcggtgtaattgctggcgcactgccgtttattgcagatgaattccagattacttcgcacacgcaagaatgggtcgtaagctccatgatgttcggtgcggcagtcggtgcggtgggcagcggctggctctcctttaaactcgggcgcaaaaagagcctgatgatcggcgcaattttgtttgttgccggttcgctgttctctgcggctgcgccaaacgttgaagtactgattctttcccgcgttctgctggggctggcggtaggtgtggcctcttataccgcaccactgtacctctctgaaattgcgccggaaaaaattcgcggcagtatgatctcgatgtatcagttaatgatcactatcgggatcctcggtgcttatctttctgataccgccttcagctacaccggtgcatggcgctggatgctgggtgtgattatcatcccggcaattttgctgctgattggtgtcttcttcctgccagacagcccacgttggtttgccgccaaacgccgttttgttgatgccgaacgcgtgctgctacgcctgcgtgacaccagcgcggaagcgaaacgcgaactggatgaaatccgtgaaagtttgcaggttaaacagagtggctgggcgctgtttaaagagaatagcaacttccgccgcgcggtgttccttggcgtactgttacaggtaatgcagcaattcaccgggatgaacgtcatcatgtattacgcgccgaaaatcttcgaactggcgggttataccaacaccaccgagcaaatgtgggggacagtgattgtcggcctgaccaacgtacttgccacctttatcgcaatcggccttgttgaccgctggggacgtaaaccaacgctaacgctgggcttcctggtgatggctgctggtatgggcgtactcggtacaatgatgcatatcggtatccactctccgtcggcgcagtatttcgccatcgccatgctgctgatgtttattgtcggttttgccatgagtgccggtccgctgatttgggtactgtgctccgaaattcagccgctgaaaggccgcgattttggcatcacctgctccaccgccaccaactggattgccaacatgatcgttggcgcaacgttcctgaccatgctcaacacgctgggcaacgctaataccttctgggtttacgcgggtctgaacgtcctgtttatcctgctgacactgtggctggtgccagaaaccaaacacgtttcgctggaacatattgaacgtaatctgatgaaaggtcgtaaactgcgcgaaatcggcgctcacgattaatctccccaggcttcctcccgtcgtggangaagccacctcttgcagtcatcttttcttcgctctatcctctgccgctatgaaaacatcccgtctccctatcgccatccagcaggccgttatgcgtcgcctgcgggaaaaactcgcccaggccaacctgaaattggggcgtaactacccggagccaaaactctcttacacccagcgcggaacctctgccggaacagcctggctggaaagctatgaaattcgccttaatcccgttttgctgttggaaaacagtgaagcctttattgaagaagtggtgccgcacgaactggcacatttgctggtatggaaacattttggccgcgtagcaccacatggcaaagagtggaagtggatgatggaaagtgtgctgggcgttccagcccgccgtacgcatcagttcgaactgcaatccgtgcgccgcaacaccttcccctaccgctgtaagtgtcaggaacatcagcttaccgtacgccgtcataatcgcgtagttcgtggcgaagccgtctatcgctgtgttcactgcggcgaacaactggtcgcaaaataaccatctgaactatcaggaactttcctgatctggctgattgcataccaaaacaactttcgctacgttgctggctcgttttaacacggagtaagtgatgtaccgttatttgtctattgctgcggtggtactgagcgcagcattttccggcccggcgttggccgaaggtatcaatagtttttctcaggcgaaagccgcggcggtaaaagtccacgctgacgcgcccggtacgttttattgcggatgtaaaattaactggcagggcaaaaaaggcgttgtcgatctgcaatcgtgcggctatcaggtgcgcaaaaatgaaaaccgcgccagccgcgtagagtgggaacacgtcgttcccgcctggcaattcggtcaccagcgccagtgctggcaggacggtggacgtaaaaattgcnccaaagatccggtctatcgcaagatggaaagcgatatgcataacctgcaaccgtcagtcggcgaggtgaatggcgatcgcggcaactttatgtacagccagtggaatggcggtgaaggccagtacggtcaatgcgccatgaaggtcgatttcaaagaaaaagctgccgaaccaccagcgcgtgcacgcggtgccattgcgcgcacctacttctatatgcgtgaccattacaacctgacactctctcgccagcaaacgcagctgttcaacgcatgggacaagatgtatccggttaccgactgggagtgcgagcgcgatgaacgcatcgcgaaggtacagggcaatcataacccgtatgtgcaacgcgcttgccaggcgcgaaagagctaacctacactagcgggattctttttgttaacccntaccccacgcgtacaaccgcgtggggagacgacgcggatttttaactatgcgtatcccccgcatttatcatcctgaaccactgaccagccattctcacatcgcgctttgcgaagatgccgccaaccatattgggcgcgtactgcgtatggggccgggacaggcgttgcaattgtttgacggcagcaaccaggtctttgacgccgaaattaccagcgccagcaaaaaaagcgtggaagtgaaggtgctggaaggccagatcgacgatcgcgaatctccgctgcatattcacctcggtcaggtgatgtcgcgtggtgaaaaaatggaatttacgatccagaaatcgatcgaactcggtgtaagcctcattacgccacttttttctgagcgctgcggcgttaaactggatagtgaacgtctgaacaagaagctccagcagtggcagaagattgcaattgctgcctgtgagcagtgtggtcgtaaccgggtgccggaaatccgtccagcgatggatctggaagcctggtgtgcagagcaggatgaaggactgaaactgaatcttcacccgcgcgccagtaacagcatcaatacgttgcctttaccggttgaacgcgtccgcctgctgattggcccggaaggcggtttatcggcagatgaaattgccatgactgcccgctatcaatttactgatatcctgttgggacctcgcgttttgcgtacagagacaactgcgctcaccgccattaccgcgctacaagtacgatttggcgatttgggctaacggagaagaataatgatcaagctcggcatcgtgatggaccccatcgcaaacatcaacatcaagaaagattccagtttcgctatgttgctggaagcacagcgtcgtggttacgaacttcactatatggagatgggcgatctgtatctgaacaatggcgaagcccgcgcccatacccgcacgctgaacgtgaaacagaactacgaagagtggttttcattcgtcggtgaacaggatctgccgctggccgatctcgatgtgatcctgatgcgtaaagacccgccgtttgataccgagtttatctacgcgacctatattctggaacgtgccgaagagaaagggacgctgatcgttaacaagccgcagagcctgcgcgactgtaacgagaaactgtttaccgcctggttctctgacttaacgccagaaacgctggttacgcgcaataaagcgcagctaaaagcgttctgggagaaacacagcgacatcattcttaagccgctggacggtatgggcggcgcgtcgattttccgcgtgaaagaaggcgatccaaacctcggcgtcattgccgaaaccttgaccgaacacggcactcgctactgcatggcacaaaattatctgccagccattaaagatggcgacaaacgcgtgctggtggtggacggcgaaccagtaccgtactgcctggcgcgtattccgcaggggggcgaaacccgtggcaatctggctgccggtggtcgcggtgaacctcgtccgctgacggaaagtgactggaaaatcgcccgtcagatcgggccgacgctgaaagaaaaagggctgatttttgttggtctggatatcatcggcgaccgtctgactgaaattaacgtcaccagcccaacctgtattcgtgagattgaagcagagtttccggtgtcgatcaccggaatgttaatggatgccatcgaagcacgtttacagcagtagtaacccaccttagcgagaaggatctcgttgagactctgagtgacagcgcccttctttccacgcatactgggcgctgttgcttttttgaaccaggaaacagaacctctgacaatgaatttacagcatcactttcttattgccatgcctgctctccaggatccgattttccgtcgttccgtggtctacatttgcgaacataataccaatggtgcaatggggatcatcgtcaacaagccgctggaaaatctcaaaattgaagggattctggaaaagctgaagatcacgccggagccgcgtgatgaatcaatccgtctggataaaccggttatgctcggcggcccactggctgaagatcgcgggtttattttgcatactccgccctccaattttgcttccagcattcgcatttcagacaacacagtgatgaccacttcccgcgatgtgctggaaacgctcggcaccgataaacaaccgtctgacgtattggtggctctgggctatgcctcctgggaaaaaggtcaactggaacaagaaattctcgataacgcgtggctaaccgccccggcagatctgaatattctgttcaaaacgccaattgccgaccgctggcgcgaggcggcaaaactgattggtgtggatattctcaccatgcctggtgtggcaggacacgcctgatgagtggaaccttactcgccttcgacttcggcaccaaaagcattggcgtagcggtcggccaacgcattaccggcaccgctcgccctttgcctgcaattaaagcacaggacggtacgccggactggaacctcatcgaacgtttactgaaagagtggcagccagacgaaatcatcgtcggtttaccgctgaatatggacggcaccgaacagccgttaaccgccagagcgcgtaaatttgctaaccgtattcatggtcgtttcggtgttgaagtaaagctccatgacgagcgtcttagcaccgtggaggcacgttccggtctgtttgaacagggcggctatcgggcgctcaacaaaggcaaaatcgactctgcctctgcggttattattctcgaaagctatttcgagcagggatattaaggagatttaatcgcctgctggagtgtaaataatatcatcgcgccttacgccttattgccggattgnnnnntgaacgccttatccggcctacatgtggcagcggttgtaggtctgataagacgcgcaagcgtcnnnntnnnnnacgtttattgcctttgtaggcccgataagcttgcgcatcgggcatggcaacgtcacaaacgcccttcccccacccgctgctgataactctgctgaaacgttatcatccccacctgttgcccagtttgaataacatgcggtaactggtgggttttcccttcgcgaatcaaattccccaccgcgggtgtgttaatcagcaattcaaatagcgccacgcgtccttcctgtttatccacttccagcttttgtgacagcactgcccgtaaactacctgccagttgattacgcacggggtctttttcctgcnccggaaatgaatccacaagtcgctcaactgcctgcgcggcaccacgtgtatgtaaggttgccagcaccagatgcccggtttctgccgccgtcagcgccagacggattgtctcgctgtcacgcagctctccgagcaaaatcacatcaggatcttcccgcaatgcggcccgcaatcccgatgcgaacgtcatacaatgcaaaccgatttcccgctgctggatcaaacatcgctggctggcatagagatattccacaggatcttccagcgtcagaatatgcgcatcagcatgttgattgagataaccaaccatcgccgccagcgtggtagatttgccactccccgtcgcccccgtcaccagaatcaagccattctcgctcttgagtaactccggcaatatcggtggtgtgccaagctgttcgagctgcgggcagtgcgaaggtaacagccgtaacgccagcgaaatgccatgccgttgcgcgaatgcgctgccacgcaatcgctggttttccgtcagcgacacggcaaaatccagctgaccattctccagcaatattgcccgctgatcgtcatccagccactcccgcagtagctcttcgacgtccggcgcatcaaacggcgcagcttccattagcccgcgaatgcgccatcgtgcgggccaggcgctgcacaggtgtagatccgagacgttatgctttacactaagggccacaatttcttccatattcatactaagatcctcggaaaatgaacgatattgcgcataacctggcacaggtccgggacaaaatctcagcggctgcaacgcgttgcggccgttctccagaagaaattacgctgcttgcagtcagtaaaacaaaacctgcgagcgccatcgcagaagccattgatgccgggcagcgtcaatttggtgaaaactacgttcaggaaggggtagataaaattcgccactttcaggaactgggcgtaacaggattagaatggcattttattggcccgttgcagtctaataaaagccgcctggtggcagagcatttcgactggtgtcataccatcgaccgtttgcgcattgctacccgcctcaacgatcagcgcccggcagaacttccccctcttaacgtactgattcaaattaatattagtgatgaaaacagtaagtccgggattcaactggcagaactggacgagctggcagctgcggtcgctgaactaccgcgtttacgtctgcgcgggctgatggcaatccctgcgcctgagtcagaatatgtaaggcagtttgaagttgcacgccaaatggctgtagcatttgccggactgaaaacgcgctacccgcatatcgacacgctctctctgggaatgtcggacgatatggaagccgccattgcggcaggtagcacgatggttcgtatcggcactgcaatttttggtgcgcgtgattactctaaaaaataaggaattaaaggaacgccatgaatacgttgactttcctgctttcaacggtcattgagctgtataccatggtgctgttattacgcatctggatgcagtgggctcattgtgatttttacaaccccttctcacagtttgtagtgaaggtaacgcagccaattatcgggccactgcgccgcgttattccggcaatgggacccattgatagcgcctcgctgctggttgcctatattctcagttttatcaaagccatcgtgctgtttaaagtggtgaccttcctgccaatcatctggattgccggtttactgattctgctgaaaaccatcggcctgctgattttctgggtcctgctggtgatggcgattatgagctgggtaagccagggccgtagcccgattgaatacgtgctgattcagctggccgatccgctgctgcgcccgattcgccgcttgctaccggcaatgggggggattgatttctcgccgatgatcctcgttctgctgctgtatgtcatcaatatgggtgtcgcagaagtattacaggcgaccggaaatatgctgctgccggggctgtggatggcgttatgagtgccgtaacagttaacgatgacggtctggttttacggctctatattcagccgaaagccagccgtgattctattgtcggtttacatggcgacgaggtaaaagtcgccattaccgcgccgccggttgacggtcaggccaacagccatctggtgaagtttctcggtaagcaattccgggttgccaaaagccaggtggtgattgaaaaaggcgaacttggccgccacaaacaaattaaaatcattaatccgcaacaaatcccgccagaagtcgcggcgttaattaattaggtatcctatgcaaaaagttgtcctcgcaaccggcaatgccggtaaagtgcgtgagctggcgtcgctgcttagcgacttcggtcttgatatcgtggcccaaacagaactcggcgttgattccgctgaagaaaccggcctgacctttatcgaaaacgcgattctgaaagcgcgccacgcggcaaaagtgaccggtttaccggcaattgccgacgactctggcctggcggtagatgtgcttggcggcgcgccgggtatttactccgcacgttattccggtgaagacgcgaccgatcaaaagaatctgcaaaaactgctggaaacactgaaagacgtaccggacgaccaacgtcaggcgcgtttccactgcgtgctggtgtatctgcgtcacgcagaagatccgaccccgctggtgtgccatggcagctggccgggtgtgattactcgcgaaccggcgggcactggtggctttggttatgatccaatcttcttcgtaccttccgaagggaaaaccgctgccgaactgacccgcgaagaaaagagcgccatttcccaccgtggtcaggcattgaaactgctgctggacgctttacgtaatggttaaattaccgccgctgantctctacattcacatcccgtggtgcgtgcagaaatgcccgtactgcgatttcaactctcacgcgttgaaaggagaagtgccgcacgacgattacgttcagcatctgcttaacgatctggacaacgatgtggcttacgctcagggccgtgaagtaaagacaatctttattggcggtggtacgccgagcctgctttccggctcggcgatgcaaacgctgctggacggcgtgcgtgcgcgtttgccgctggcagcggatgcagaaattaccatggaagcgaaccccggtacggtagaagccgatcgctttgttgattatcagcgtgccggtgtaaatcgtatctctattggggtacagagttttagcgaagaaaagctgaaacggctgggacgtattcatggcccgcaagaagcgaaacgagcggcaaagctggcgagcggtttagggttacgtagctttaaccttgatttgatgcatgggctaccggatcaatcgctggaagaggcgcttggcgatctgcgccaggctattgaactgaatccgccgcatctttcctggtatcaactgaccatcgaacctaatacgctgtttggttcacgcccgccggtactgccggacgacgacgcgctgtgggatattttcgaacaggggcatcagttattaaccgcagcgggttatcagcaatatgaaacttccgcttacgccaaacccggttatcagtgccagcacaatctcaactactggcgctttggtgactacatcggtattggctgcggcgcgcacggcaaagtgaccttcccggatgggcgcattctgcgtaccaccaaaacgcgtcatccgcgtggttttatgcaaggaaggtatctggaaagccagcgtgatgtcgaagccgcagataagccgtttgagttctttatgaatcgcttccggttgctggaacctgcgccgcgcgtggagtttagtgcgtataccgggctttgcgaagatgtgattcgcccacagttagacgaggcgattgcccagggttatctcaccgaatgtgcggattactggcagattacggaacatgggaagctgtttttaaattcgctgctggagctttttctggctgagtaaacttgtattgccggatgcggcgtgagcacctcagccgacatgtggcagctgttgtaggtctgataagacgcgctagcgtcgcatcagacgttgattgccggatgcggggtcaacgccgcatcctgctacaaatcgtgcgctatatcaaaacttacttaatcaccccattgcgccgcagttgttcggtatcttttttccagcgttcattagcctggttgatatcgtcaattttcatcaaaatcgcgacttttttactgtttatttctgaaactttcatcgttaacggatattgccctttttcgagcgttatccagtcatcctgcaatttacggctaagtttttgtgattgcagaaaagtctgtcgccgttgttcgttgatatcgaaatctcgtttctgctgaatcggcacttcataacactcttcactctgtttatgacatgccgcaatcgccggttgataaacctctttgtcatatttaaccgcgaacgcctcgctatcgttctgtttattaaactcatcacgctgttggtgaatttttttaaaggcatcttcgcgggtcatttgcttaccatttgcatcttttccccaatatgcatccgctgctttctgcgccgccaccatttgcttatcaagcgctttcacttccttttccagcgcaggaatcgagttcttctgggtattcaacgcagtctcaagctgactaaagcgataattgaaatcttcgctattcacgatcagatatttattattcgttttgatatcgtcgaccacccgaccacgatcgctagctgccgcctgaaaagagtaaaagttcaccgtccagccagacgcgggcgttcctttactggttaacatcgccgagaattttaccggtttatctttcgtccaggtctgttcgagcagttcgtaatctgccaactgaccgacccaggtatagagatcgtcactggaagagacatcgccttccgctgaccaggtggcctgattacccttagcatcaagattttttaaggtgatggcatcaagcttgagaatgccgtgatactgctttttgaattgatcttttaagatattttcagttggcggttcgccatctgcccagacattaccagtcatcaacataagcagcgccgtgccaacaatccattgctttttcacccgaaaaccctcgcgcggaataatttattctggtgattatcattagggcaattaaaattggcaatggacgtaagtctgaagtgaaaaagccccggcgcgataccggggcgaaatgattagtactgattgaagatctgctggatctgctgcggatctttggtttgcgtcagagccagttgcagcaggacgcgcgctntttgcgggttcagcgtaccagaggcaataaaaccgtatttcgcatcatccacttcggcatcctgagtggtagcgcccgtcggtacgcgggaagaacgcacgactgcagtaccgtttttcgcggcggtcgccagcgtgtcaaacacggatttatacaggttgccgttacccacaccagcgctcacgatgccatcatagcccgcatctaccagggctttagccggaagatcggatgcgttagcgtagttataaacaatgccgactttcggcagttcattcagcttagagacatcgaacggcgtgtcgctggtgtgcttacgtgccggggtacgttggtagtcaatcttaccgttgtgaatgtatcccagcggaccgtagttaacagacttgaaggtcgctacgtcggtggtgttggttttggtgacatcgcgaccgtccagtacggtgtcgttcatcaccaccagcacgccacgattagcggaggctttatcagctgcggtcactaccgcgttatacaggttgaatggaccgtctgcgctcatagacgtggacggacgcattgcgccgaccatcaccaccggtttgtcgcatttcaccgtcaggccgaggaagtaagcggtttcttccatcgtgtcggtaccgtgagtaatgacgaagccgtcggttttatcgcagtcggtgttaatttttttcgccagtgtcagccagacatcatcgttcatgtcctgggagccgatattcactacctgctcgcctttaacgttcgcaatgtccttcagttgcggcaccgcattaaccagattttctacgccaactttacccgctgtgtagttagatttggttgcggagtcaccaccaccggcaatggtcccgccggttgctaaaatggtgatattgggtaatgccaatgctgcaccactaaaacccataaccagtgcggcaagtgccgtctttttgaaaaactccatttcattcctccagttacgtgaacgctacgcattatcccttagctctgtatgggaaatttgacgttaaacaatttacaacgtgaatatattttggagatctacaaagttagaggcaggtaacaaaacgaagaattaaacggcataaaaaagtattatgccgtcttaaaatagaggattattttaaattcccgaccagggctttgcggctatcttccagagtcacaacgcggctacaaacatctttgccaaactgctggaaatctttttcctgctttttccactcggtttggattgaggattgcagcccccccaggcttcccagcacattctgtaatgggttaccgccgcttttcagcaccgctttcgcgcccatttcattaatgctgtcctgtaaaattccgcccattgcctgattcactaattgctggccttcancgcgaacctgatcaatggctttatagtggaacgtcaggccatcgctgcgcgtttcgataatgcggttcatctgctctttcagctgcgcatcaagtttggtcagacggctgcgcattttgctgctttcgcccatctcctgaacgataattttatccagagcaatacgggctttctcgacgcggcttttcgcgccttcatcaatccacggcagcgtgctacgtagttcagcctgataatccttcgcctgctcgcgctgggcggcattcagggaatattgcttaccgttatacatcacgttgccgtctggcgtgatcaccagattgccgttttcgcccttcacctgcacggtttgcgggctgacaatcacatcgtcacgcggcgtgacgctgcactggtagtcggcgtgagcggtcattgccgtcactgaaagtgctgccgccagcagcattttgcgcatcatagtcttccctcaagaacaaatcaggccagcatttgctggccccagattgataacaaagtacgcgttttccatgccggatgcggcgtaaacgccttatcccgcctactcgatcgtgcatctttgtaggcatgataagcgtagcgcatcaggcagttttgcatttgtcatcgcccgtatgctttcttagtcccaccaaacgtcgaaaagttcgctggtgcgtacctcatccaggttgcgctcttccagccacttacgcacaatcgcctgatgttcttcggtgcatttgccgatttcctgcatgcagatcagaccttcccaggccagataaccgctgccgtcaaaggccagtttgttcggttcgataacctcgttaataaaatcatcaacggttttatcaatctgttcttccgatgtaccttccgggaatcgccatgccaccgaaaatcctaattcctggaattcgtcgatgtgcatttttttacgcagacgacggctacggttctttgccattatttcaccctctcgaacattaagtcccatactccgtgaccaagacgatgaccacgttgttcaaatttcgtcaccggacgtgatgccggacgcggtacgtaatcattgctctctgacaggtttttataaccgtcaatagaagacatcacttcaatcatatgttccgcataaggttcccagtcggtcgccatatggaatacgccccccagctgcagtttgctttttaccagttcggcaaacggcacctgaacgatacggcgtttantatggcgcgctttgtgccacgggtcagggaaaaagagctgcaccatgcgcaatgaattgtcaggaatcattttatgcagcacttcaaccgcatcgtgacacatcacgcgcaggttgcttaagccctcttcatgcgcagaagccaggcacgcaccaacgcccggtgaatgcacttcaatgccgaggaagtcctgctcggggcgatctttagccattgccaccagcgacgcccccatgccaaaaccaatctcaagcgtcaccggcgcttcacggccaaaaagcgcggggaaatccagcatatcttcgctgaactcaacgcccatcaccggccagtagttttccagcgcatgttcctggcctttggtcagtcgcccctggcggcgcacaaaactacggatacggcgcagtgggcggccgttttcatcaaattccggtgaaatgacgtcgtttttcataaagatttagtcgcttgtgaaagtgttctgaaaacgggcattatccaaagttagttgccggatgcaagcatgataaggccgtggctgcggaaagttccggtttacaccctgccgtcgctgtgctgcaatcttgcccccaacaacagtgaattcggtgaccatgcaagcgtcgcaattttcagcccaggttctggactggtacgataaatacgggcgaaaaactctgccctggcaaattgacaagacgccctacaaagtatggctctcagaagtgatgttgcaacaaactcaggttgcgaccgttatcccctattttgaacgctttatggcgcgcttcccgacggtgaccgatctcgccaatgcgccgctcgacgaagttctccacttgtggacggggcttggctattacgcccgcgcgcgcaatctgcataaagcggcacaacaagtggcgaccttacacggcggtaaattcccggaaacctttgaggaagttgcagcactgccgggcgtcgggcgttccaccgcaggcgcgattctatcgctttctctgggtaagcactttccgattctcgacggtaacgtcaaacgggtgctggcgcgctgctatgctgtaagcggctggcctgggaaaaaagaggtcgagaataaattatggagtttaagcgagcaggtgacgcccgcggtcggcgtggaacggtttaatcaggcgatgatggatttgggcgcgatgatttgcacgcgttcgaagccgaaatgttcgctctgtccgctacaaaacggatgtattgccgccaccaacaatagctggtcgctttatccgggcaaaaaaccgaaacagacgctgccggagcgcaccggctactttctcctgttacagcacgaagatgaagtattgctggcgcagcgtccgccgagcggattgtggggcggtttatactgtttcccgcagtttgccgacgaagaaagtttgcggcagtggctggcgcaacggcagattgctgccgataacctgacgcagctgaccgcgtttcggcataccttcagccatttccacttagatattgtgcctatgtggcttcccgtgtcgtcattcaccggctgcatggatgaaggcaatgcgctctggtataacttagcgcaaccgccgtcagttggcctggcggctcccgtggagcgtttgttacagcagttacgcactggcgcgccggtttagcgcgtgagtcgataaagaggatgatttatgagcagaacgattttttgtactttcctgcaacgtgaagcagaaggtcaggattttcagctgtaccccggcgaactgggaaaacgcatctataacgagatctccaaagaagcctgggcgcagtggcagcacaaacaaaccatgctgattaatgaaaagaaactcaacatgatgaatgccgagcaccgcaagctgctggagcaggagatggtcaacttcctgttcgagggtaaagaggtgcatatcgagggctatacgccggaagataaaaaataaaaacagtgccggagcacgcctccggcagcttgcataaaaacaaacacaacacgcacccggaatgatgaaaaaatatctcgcgctggctttgattgcgccgttgctcatctcctgttcgacgaccaaaaaaggcggtacctataacgaagcctgggtcaaagacaccaacggttttgatattctgatggggcaatttgcccacaatattgagaacatctggggattcaaagaggtggtgatcgccggtcctaaggactacgtgaaatacaccgatcaatatcagacccgcagccacatcaacttcgatgacggtacgattactatcgaaaccatcgccgggacagaacctgccgcgcatttgcgccgggcaattatcaaaacgttgctgatgggtgacgatccgagttcggtcgatctctattccgacgttgatgatattacaatttcgaaagaacctttcctttacggtcaggtggtggacaacaccgggcagccgattcgctgggaaggtcgcgcaagcaacttcgcggattatctgctgaaaaaccgtctgaagagccgcagcaacgggctgcgtatcatctacagcgtcaccattaacatggtgccgaaccaccttgataaacgtgcacacaaatatctcggcatggtccgccaggcgtcacggaaatatggcgttgatgagtcgctgattctggcaattatgcagactgaatcttcctttaacccgtatgcggtcagccgttccgatgcgctggggttaatgcaggtggtacaacatactgccgggaaagatgtgttccgctcgcaggggaaatccggcacgccgagccgcagtttcttgtttgatcctaccagcaatattgataccggcaccgcgtatctggcgatgctgaacaatgtttatctcggcggaattgataaccctacatcccggcgttatgccgtcatcaccgcctataacggcngcgcaggcagcgtgctgcgagtcttttcgaatgataagattcaggcggctaatattattaacaccatgacgccgggcgatgtttatcaaacgctgacgacccgccatccctctgcggaatctcgccgttatctttataaagtgaataccgcgcaaaaatcctaccgccgccgataattccactaaccgcccctgacgatgctcangggcaaaaatgttatccatatcacaatttcgttttgcaaattaggaatgtttgcaattatttgccacaggtaacaaaaaaccagtccgcgaagttgatagaatcccatcatctcgcacggtcaaatgtgctttttcaaacactcatccgcatcacgatgtgaggaaattaacatgaatcttaagctgcagctgaaaatcctctcttttctgcagttctgtctgtggggaanttggctgacgaccctcggttcctatatgtttgttaccctgaagtttgacggtgcttctattggcgcagtttatagctcactgggtatcgccgcggtctttatgcctgcgctgctggggattgtggccgacaaatggttaagtgcgaaatgggtatatgccatttgccacaccattggcgctatcacgctgttcatggcggcacaggtcacgacgccggaggcgatgttccttgtgatattgattaactcgtttgcttatatgccaacgcttgggttaatcaacaccatctcttactatcgcctgcaaaatgccgggatggatatcgttactgacttcccgccaatccgtatctggggcaccatcggctttatcatggcaatgtgggtggtgagcctgtctggcttcgaattaagccacatgcagctgtatattggcgcagcactttccgccattctggttctgtttaccctgactctgccgcatattccggttgctaaacagcaagcgaatcagagctggacaaccctgctgggcctcgatgcattcgcgctgtnnnnaaacaagcgtatggcaatcttcttcatcttctcaatgctgctgggcgcggaactgcagattaccaacatgttcggtaataccttcctgcacagcttcgacaaagatccgatgtttgccagcagctttattgtgcagcatgcgtcaatcatcatgtcgatttcgcagatctctgaaaccctgttcattctgaccatcccgttcttcttaagccgctacggtattaagaacgtaatgatgatcagtattgtggcgtggatcctgcgttttgcgctgtttgcttacggcgacccgactccgttcggcaccgtactgctggttctgtcgatgattgtttacggctgtgcgttcgacttcttcaacatctctggttcggtgtttgtcgaaaaagaagttagcccggcaattcgcgccagtgcacaagggatgttcctgatgatgactaacggcttcggctgtatcctcggcggcatcgtgagcggtaaagttgttgagatgtacacccaaaacggcattaccgactggcagaccgtatggttgattttcgctggttactccgtggttctggccttcgcgttcatggcgatgttcaaatataaacacgttcgtgtcccgacaggtacacagacggttagccactaattacgcaaagaaaaacgggtcgccagaaggcgacccgttttttttattcttacttcaacacataaccgtacaaccgtttcatgccatccgcatcggtttcgctataaacaccttgcagctccggcgaaaatcccggcaacaaattcaccccttcttccagtgcaaggaaataacgttgaaccgccccaccccagacttccccgggtacaacgcaaagcacgccaggtggataaggcaacgccccttctgccgcaattcgcccttcggcatcacgaatccgcaccaactccacgtcacngcgaatataagcgctatgcgcatcctgggggttcatcaccactgacgggaaactctgctggcggaacatcgctttttgtaggtctttgacgtcgaaactgacatacagatcgtgcatctcctgacacaactggcgcagggtgtagtcgcgatagcgcaccggatatttgttataaacgctcggcaacacctcagccagcggcgagtcatcctcaatatgctgttcaaattgagccagcatcgccaccagttgtgccagcctctcgtggctttccgccggagttaataagaacagaatggaattgagatcgcacttctccggcacaatgccgttctcacgcagatagtgcgccagaatcgtcgccggaacgccaaagtcgctatattcgccggtttcggcatcgatacctggtgtagtgagtaacagcttgcacggatcaacaaaatactgatccgcggcatatccttcaaagccgtgccacttcgcccccggctcaaaactgaaaaaacgacggtcgctggctaacactgatgtcggataatcctgccacaatttgccatcaacaacgggcgggataaacgggcggaacagcttacagcgcgcaagaatagccttgcgcgactcaatacccaactcaacgcactcagcccacagccgacgcccactctccccttcatgaattttggcgttaacatccagtgcagcaaacagcggatagaaagggctggtagaagcatggagcataaaggcgttattcaaccgcttatgcgggcaaaaacgcgcctgtccgcggatatggttatcttttttatggatctgcgacgtctgtgagaatcccgcctgctgtttgtgcaccgactgagtcacaaagatccccggatcgttttcgttaagttctaacagcagcggcgagctatccgccatcatcgggataaattgttcataaccgacccacgcggaatcaaacagaatgtaatcacacagatgcccaacggtatcgatcacctgacgggcgttatagacagtgccgtcataggttcccagctgaataatcgccaggcgaaacgggcgcggcaggtcggctttttctggcgcaacgtcgcgaatttgctggcgcagatactcttcattaaaacagtgcgcatcaataccgccaatgaaaccaaacgggttacgtgaagcttccagatagaccggcgtcgcccccgcctgaatcaacgcgccgtgatgattcgacttatggttgttacggtcaaagagcaccagatcgccacgcgttaacagcgcattcgtcaccactttattcgctgccgatgtgccgttcagcacaaaataggttttatcggcatgaaagactttggctgcgaatttctgcgcatctttcgccgatccttcatgaataagcagatcgcccaattttacgtcagcgttacacatatcggcgcgaaagatgttctcaccaaagaaatcgtaaaaatggcgtccggcaggatgctttttaaagaacgcaccatgttgatgtccagggcaagcaaaggtgctgttgcccatctcaacgtactgcgtcagcgtgtcataaaacggtggcagcaaattctcttcatactgacaggctgcggattccagctccagccactgctgctcgttgccgttgattaccgccgtaacgcccgcaggtaattcaacagcatgttcggaatacaaaaacaccggtagatgaaaaccggtgcgcttaagcaacgtaagaatgccactgcgactatccgcagcggtaatgacgactgccgcgacgtccgtaaaatcagtatctcccaacgccaccacgcggcgatgagtagaaagtcgggataccagttcactactggcggcaatattcattgatttcataagcgcaaacccgtttcggggaagtaagaatactggacaaggtgtaaaaccctgccccatgagatatgggtcaaactggtcaccagctccgaccgccagacatcagtaaaagcagaaaggctctgattttactgttgtcctgcagtgagcgtgcgttaacttcaccgcatgagcagtagcataaaaagagaagggtttcnnncgaaacggcgataagcgagagaatgtaaggagatggcgtgcatcgggcaaactccgtacagagaggagaaaattcgcgcaatcatggcacctttcgctaaggcgtgcaagccaggactttgcgaccagacaagccatcaacaaggcaaaaagttcataataagaaaatcaaacaatacagttaacaggaactcttgtggtcatcggcccttttatcaacgcaagtgcaatattactgggtggcatgctcggtgcactgcttagccaacgcttaccggaacgtatccgcgtctccatgacatcaatttttggtttggcatcgctggggattggtattttactggtggtgaaatgcgccaaccttccggcgatggttttagcaaccttactcggagcattaatcggcgaaatttgtctgctggagaaaggcgtcaatacagcggtcgccaaagcacaaaatctgtttcgtcactcacgtaagaagccagcgcatgaatcttttattcagaattatgtcgcgattattgtcctgttttgcgccagcggcaccgggatcttcggggcgatgaacgaagggatgaccggcgatccgagtattttaatcgccaagtcatttcttgatttctttacggcgatgatcttcgcctgctcgctgggtattgcggtatcggtgattagtatcccattactgatcatccagttaacgctggcgtgggctgccgcgctgatattaccgctgaccacaccgtcgatgatggcagacttcagcgccgtaggcggtttattgctgctggcaaccggattacgcatctgtggcattaaaatgttcccggtggtcaacatgcttccagcactccttctggcaatgccgctttccgccgcctggaccgcctggtttgcctgacaatgtgtgcaatagcggcaaagtgatgatagattgtgcagtctgcagtaaattgaagaaatttgattgacgagacgaggcgaatcaggtttaatgcgccccgttgcccggatagctcagtcggtagagcaggggattgaaaatccccgtgtccttggttcgattccgagtccgggcaccaaattcatatcaacggacctccacggaggtccgtttttcgtttcagaacaccatgatttaagtgttcttcctccaaatcaattctaccgaactcaaccaaattctccccacatcaacctcattgtgtgggtataattgcgggcataccccagttcgacagaatttgtaccctctttaacgcattcagaaggctgaactatggcactgactgacgcaaaaatccgggctgcaaagcccactgacaaggcttataaactcactgacggggctggcatgttcctgctggtacatcctaatggttcccgttactggcgtctccgttatcgtattctgggtaaagagaagactctggcacttgttgtgtatccagaagtatctctctccgaagctcgtacaaaacgggatgaggcccgaaaactgatttcggagggggttgacccttgcgaacagaaaagagctaaaaaagtagtccctgatttacaactctctttcgaacatattgcacgacgctggcatgccagtaataaacaatgggcacaatcacacagcgataaagtactcaaaagcctcgagacacacgtattcccctttatcggcaatcgggatatcacaacactcaataccccggacctgcttatccctgttcgtgctgcagaagctaaacaaatttatgaaatcgccagtcgtctgcagcaaagaatatctgccgtaatgcgttatgccgtacagtctggcatcatcagatataatcctgctctggatatggctggcgcattgactacggtaaaacgccagcatcgccccgctcttgatctttctcgcctgcctgaacttttgtcgcgtattggcagttacaaggggcaacctgtcacccagcttgccgttatgctgaatttactggtttttattcgttccagtgaactcagatacgcccgctggtctgaaattgatattgacaatgccatgtggactattccagccgaacgcgaacctctgccaggcgtaaaattctcacaccggggatccaagatgcgaacaccacatcttgtgccactcagcaaacaggttgtagccatactggcagaacttcagacatgggctggtgaaaatggtctgatctttacgggagcacatgacccacgtaaaccaatcagtgaaaacaccgtaaataaagccctgagggttatggggtatgacacaacccaggatgtctgtggtcatggattccgggcgatggcatgtagtgcgttaatagaatcaggtttgtggtcccgcgatgcagttgaacgtcagatgagccatcaggaacgtaacggtgtacgtgctgcttacattcataaagcagaacatctggaagaacggcgactgatgctacagtggtgggccgattttctggatgcaaacagagaaagatttatcagtccatttgaatatgcaaagattaataatccattaaaacagtaatcatcccgggcaaatgcccgggaacctactccaggattattttctttgttaaaaaaacagacaaaacggtattagcttcgtaagcgtacagcgagggccgtattgacggggatgtgttattcagctggcagtgctatgcgccacggaagcagttcgctgacccggttgaccggccagtctgctatgacgccaagcacatggcgaangtagctttctggatccacgtcattcagtttgcacatcccgatcaggctgtacagtagcgctccccgctcaccaccatggtcagagccgaagaacaggaagtttttacgacccagactgaccgcccgcagggcattttcagcgatgttgttgtcgatttccacccagccatcgttcgcatagtacgtcagtgccggccactggttaagtgcgtacgcgaacgccttcgccaactctgagtgtcgcgacagggtcttcatcttttcacgcaaccagctttccagggatttcaacagcggtttcgtttttcgctgacgttcagcaagccgctgctctgccggcattccccttatatccgcctctatggcgtacaactgaccgatctgctccagggcttcttccgtcagtgctgacgggatgcggacgtgcacatcgtggatctttcggcgggcatgagcccagcaggcagcttccgttatcccaccattgcgatacagctcgttgaacccggcgtacgcatccgcttgcagcacactgtcacgaacggtgcaatagtcatccgtcgttgacaacagctgatactgagggtttccgggtcctctgcgagcgattctggctgttcggcagctgcatcgagagtcacaggaagtagctgggggctctctgaagaaggtaatagcagctttccctcgcgccattgttgtgtaagcgccccatctgcgacgtcttgtgaaaattgtcctgtctggcaacaatcgcgcccatctatatagatggacacgaacgatgaattcccagacaaaaaaagatattccctgcttccgttcttatttgcctgatgctctgcgtttaagatttgaagataaactgaccatccgggccatcgctcagcgtctaggtctcagtcattccacaatacatacgctttttcagcgatttattgcatccggtatcgcatggccattgcccgattcagtttcattagctcagcttgacgccatcctttatgccaacagaaagaaggaattaacagagcctcaaatcagcgaaggcacatggcgaaaagaacggcgagccagctacagccgtgaatttaaggtccgtctggctaagcaggcattacagcccggtgctgttgttgcccggatcgccagagagcacggtatcaatgataacctgctgttaaaatggaaaagccagtacgaggatggcttactgagcgatgatgacatacaggaatgcatgcctgtcccggtggctctgactgatacgccagagccgaccagaccagttacaaatcccttctggcgtaacaagcctgatgagtgccctgagagtgatcccggaaacgtcccacggtgcgagctgcatcttaaatcaggtgtggtaaaactgtttgaccctctcactccggaaatgttacgggcgctaatccgcgaaatgaaaggaggtacccgatgataacgctgccaaccggtaccagaatctggatcatcgctggcatcacagatatgcgttgtggcttcaacggcctggcttcgaaggtgcagaacacgctgaaagatgccccgttctccgggcatatcttcgtcttccggggccgcagtggcaaaatggtgaaaatactgtgggncgatcgtgacgggttatgcctgttcgccaaacgcctggaacggggccgcttcgtctggccggtaacccgggaagggaaagtgcacctgacgccagctcagttatccatgctactggaggggatcgcatggcaacatcccaaacggacagaacggcctggcatccggatataacccgtgataaaacaggggaatgaacaacacactccccgacgacatcgagcaactgaaggccctgctgatcgcacagcaggctgttatcgtccgtctgtctggtgaaataaccggctatgcccgcgagatcagctcactcagagcgctggtcgctaaactgcagagaatgttgttcggtcgcagcagcgagaaaagccgcgagaagatagaaaagaagatcgcacgggcagaaacgcgtataaccgagctccagaacaggcttggtgaggcgcagttgcaactcacctcaatggccggagagacagcgccgaaaacatcagactctcccgtccgcaaagcacttccggcaacacttccccgtgacaggcaggttatctccccggcagaaaccgaatgccccgtctgcagcggcaaactgaaaccgctgggagaaagcatctctgaacaactggatatcatcaacaccgcgttcagggtaatcgaaacggttcgcccaaaacgggcctgcagccggtgcgactgtatagttcaggctccgcagccaccaaaacccatcgagcgcagttacgccagtccggctctgctggcccgcataatcatggctaagttcgccgagcatctgccgctgtaccgtcagtcggaaatctatgcccgccagggcgtggagctgcaccgcaatacgatggggcgctgggttgacatcatgggagagcagcttcgcccgctgtatgatgaactgaagcactatgtgctgatgccgggtaaagtgcatgccgatgacacgccggtaaatgtactggagccgggtcagggtaaaacccgtaccggacggctgtgggtctatgttcgtgacgatcgcaacgccggttcgaccatgccggcagcggtgtggttctcatactctcccgaccgcaaaggcatccacccacagcaacatctggcggactacagaggtatcctgcaggccgatgcatatgcgggttacaatgctctttacgaaagcggtcaggcaaccgaagcggcttgtatggcacatgcccgacgcaagatccacgatgtacatgtccgccatccaacgacagtaacgggagaagcgctccgtcgtatcggggaactgtacgctatcgaggctgagatccgcggcagtccggcagaagagcgactggcggtcagaaaagccagaacggtaccgctaatgcagtcgttgtatgagtggctccaggggcagatgaacacgctgtcgcgccactcggatacagcgaaagcgttcacctatctgctgaagcaatgggacgctctgaacgaatactgccgcaatggctgggtggagatcgacaataacctgtgtgaaaacgccctccgggtagttgcactggggcggcgtaactaccggacgtggtttctgccaggtaaaggcaacggaacaaaagaatcatggtttttccggaaccggccacaccatgaatgacacgatgcccgtcaccaatatttctgnncagaatctcctgctgaatatccataattttgatttgtgagttctgtttcacggtcacttcaggaaacagatgggcgcgcagaatatccctcatccggggtgttacccgggttctgaaccccgtggtaaacatcccggcaattttttgccggaatacctcaggtaaaacagactgcgtcatttcatcctgacagattgtctgtgctgaaggaaaaatcttttccaccgcattctcattattccctgtcagtgccttcagttgctgacgggtaatgcgggtaaacaccacaccatacgcccaggccaggttcagccgccccttatactgaccgtcattctgccgtaagcacgggtcagcaggtaaggcattaaccgtatcacaggcataacgacgaacctgtaccagcggatttatttctgatttcagaagaccgtcggtttccagtgtaacctgctcctgatttgctttacgtaatgtggatacagtccagtccttgacctccagaaataccagcccgttatccgggtcaataatgacaaaatccggatgtcggtttttccgtcccaccgggatatcgtaccagacaaagcaatcatcattcagaaagctctccagtcgtgaagccaccctcctctcccctggcgtcattctctcctcagtggacgctgatatatttatcagtttcgccataacatactcatgctccagtaaaaccataaccgtcgacatattccgtctgaagggaatatgtcgaatacttcattaaaatacaaacatttagtaaacttcactacgcaagtgcaattatccagtcccgtctaatgattaaaaacgataaccaactccaacagtaaatccattgaccgaatgttttccatatatatctgctttagttccctcatacccaacatttacagacatattgccccacggattaataataacaccagctgcataagcaaaatcagtggatttttttgatacagactcacttaaatatccatcagactcatcagcacccacactgtttctccactcataatctcccttcgctttagtatgagatatccccaccaaaccataaaaactgatatagtcattcagacgataagctgggcctgcgagaaatgaataatatttaatatcagcctgatgtctgtaaaaatcgtcagcttcatcgcgatgactgtccgcccaatcacctttcatatacgaaaaactcccgacgacactgaccggagaatcccactcatatcgatattgcagattcactcctttaatattcttaaagtcctgtaccttactctgagcataaccagccgatagcgtatgattatcagccagtcttgaaccactcataacatataatatcattactgaaattataacgagtttttttcatttaaccctccttcattaatannnnatttctgaaaatcaaaaaggaccacacatctcaaaaacattatttgaaatcatcatcaaaaaactataaatatatcacctgacgatttgaacacactgacaaaaaaccaagcatggtaataaaccgaactccccacaaacttctgttgcctcagatactcccccccctttcctcaggcacaaatgttgttccataacgaaccagccctgttcctttaaactctgcatcaatggcataatgtatactcaccagactgagtttgctcctgcatcattatttcgatacgttaatgcattgttcattgcatccggcattccccatcgaatatttactttgttatatcagtcagcccataaccaggtaaatttttaaggcttactgactgaatattcaaaatgtgttacatgttatcaaacctttaaagaataacctgctcttcttcattggccggatttagctcaatcttgtcagcaaaactaatataaagccgttcataaagagaaggatgtagcttcgttatttatcttttacatgtaacagtgccaggggatattccgcacatctctgtggctatcatccccaccacgtctccagtggcagcacctgcggcactggcacgggcgttatttccctgtaccaccgccagtgcagcattcaccacggcatgagctgccacatttgcagtcttattcaccacacctgtaacctgtctcttatacacaaatccccacccggggatttgtgatgtctgtcagtctgctttanggggactctttccatccggtagtttccttcctccccggcagcgattttttgaactttttcttcacccgttgatcttctcttatatttcattttcttcgggtctgttatggtactttctgattgttattcactggcctaacgagcagtctggacatgcccgtctcggtgatccgcgtcgtacacgacgccttgtgtcactgacctcttctctcgctcagcatgcaggtctttctattgtgaaatcatcccacttcactgctcaggttgaaggtgcgtaccgcctgatacgtaacccgtcggtgtccccgtaagccattgccgaagccggatttactgccactgcaagggcatgtgaggcacatccgctgctcctcgcgctggaagataccaccaccattaacttcggtcacagtacggcatttgatgacctggggaataccaccactaacccgaagacgcacgggctgctggctcactctgtcctgatgtacgcccccgacagcgccctgccagtcgatcttatcgaacagcagtgctggagtcgtgccacggacacctacggtgttaagcaccagcgaaaagaacgtccctgtgaagaaaaagaaagttaccgctggcagcaggcttcggagcgcatggccgaacggctgggggagatacagaaacaggtaatcactgtctgtgaccgggaagcggatatctggcattacctgcattataaagtcagccgcgggaagccacacgctgaatgtgatgcaaaaaggcgggcgggcagcccgccaggcccggatgctcatcagttacagcgaagtcagcataaaaaatcccgacaacagcggccaggcgctctcgctcacgtatgtctgttgcggggagcaggagaggacggagcctgctggtatccgctgacatcagaaaaagtggcgagtgccgccgatgcgcgacgtatcgtcagccattacgagcaacgctggctgatagaggaataccacaaagcgtggaaaagtggtggtacatgtgtggaatcgctgcgaatgcagacccgggataaccttgagcgcatggtggttatcgcggtgcgggtgctgggcctgcggcagggaggtatcagtgaagaaacacaaaatgacagctgtgagaaaatactgacgccgacagagtggaaactactgtgggttaagctggaaggaaagcagcttccggcgcaaacaccgcccctgaaatgggcctgtttgaaactggctaaactggggcgatggcatgacagcaaacgcacaagcagccccggttgggtagttatgtgggatggctggttcagacatcaggatatggctgagggttacctggtgatgaagtctcttgatcaggagatctgatcaagagacaggtcaaagatgggggacaacgtctggtgctgtataacagcacaggcctcacactcttgacgcccgtggaatatattagagaacaaaaatttcaatatgtggtggacgcatacagaggattgacagcattcccatactaattgttaagattcaaattgaagtatatctatctgtcattttgcanatgatatgcggtagctttacctaactatcatgaacatttcgaaaaatcatccacaaagccccgaagaataaagcactatcgcccgataaagacctgtaagctcagtggcatggatactattgagctcagaatggcgagctgtaccgttatttcattaccatgctcgacgaacacagcaactactctctggccgtactatcgcttaaaagtgatatcatcaggcatttcttctgctgtgtagcccagttgttccttgttggtatcaaccagatcatcactgatgatgggcaaagagttctcgggaaaattcgacaaaacgctacaggaagccaccgtcgggttcgtatggacttatctctatacgccgaaaataaatgccataagtgagcattttaaccgaacactgagggaacaatttattgagtttaatgaagaattgctctttgaatagctgaatatgttcaatctgaaactggctgagtatctggtactgtacaacagtaaaattcttcataaatcgtttaaactacaaaaatcagtagaatatattatttccactntcaggcggaaaatttatagaaaggatacaaacatatgccaataataaacaaatcggcatcaaattatgttgaatatatttcaaaaaacaatcccccttatttatcaaaaaagagagatgccagtataaatctaaatggaaaggttagtgattgcaatggggaaatcatatggtgtcgacatatagcatcatattggagtgagtttttttgtagtaattcaggaaagatagactacgaaacattttcatcccctcaattattaagcaaagctattgtaattcaggaaaacaaggggacaaataatattaagggtgatgtgtattttgttgaaaatgaatcttggggaagcgttatatataacctttttcttcaacttgagaaagagaataaatctcacacatcattagaagttcgttctcccggacatgcaatggctctgggcattaaaataaaaaacgacaaggaaaataagtttgttattaatttctatgatcccaatcagaccgcgacgcataaacgagtatttttttgcactaataacatttgtgatataataaacctgacagcatatgattttcttagtgagcaatgtctgaaatgttatgggctaaaagaagacacactgtcactttttgtggataaaacaaaatcgaatgacancaataatgtgtttataaaaaaattacctgataatattctccaaggtgttgttattaattttgctatgggagcaggactaagagagataataaaaaaggtatataacgatactcgatttacagatcttacaaaatctcagatgaaaatcttgtgtgaatcaaaaaatgttaataatgttcctgggttgcttttagctctacaaaatggacatgataatgtaattgatgaatatggtactttaattaaaaagtcaaatcttaataaagaagaattaatacatatattatctgcaagaactttggatggaaccatacctggtttatatcaggcccttcaaaatggacatgctcaagctattaagagttatggtaacttagttctggatactattaataaaaatatagatttagagtatttgctttcagcatttaaatatgaggcacatagctctaataaatatactcctggattattttctgcatttcaaaatggtcatgcagacgcaataaaggcatattgtggcgtacttggcaatagtaatttgaaaagaggtgagataatcaggatgcttgaggcgagaaattatgatggtgcaccaggattacttcttgcgtatcaaaatggagatattaatacgattcagtctttttttgactcactaataatgttagatatatcaaaggattttatcgaagagttattgactgcaaaacattatgattttacggggttatcattagcgatcagtcatagacatgatcatgttgtcaaattatacggaaagttatttaaaaaacttgataccagtccatataaaatgtcaattatcctagcattagcaattgattgcgagagaaataatgcaaacataattattgatagtgagtacaagtcaaataaggcagtaaaggaatatgtagaaattttaaaagaattcaatatatgcccagaaaaggtagcagaatacctaagcgagttcagcggaaaacatttcctcgatgtatataattattattccaattgaaaaaaatataaagtatctatcacggcactctcagttgagtatcacaggcacatgtattttagccccctgagtctacagacaaccaatattacttaaataagtgataatcttaatgctgttttttagaacagatgattgatatttttgggccggagaaacgcagacaggctttgttgaataaatcgagcttttgctgnnnnnnaggatcagatcactcattttcctgcaaaagctcattgggcgaaacaatctgactcagagaacccggattaaacgtctggcccncagaatcatctatttctcacgcactgtagtacgtaataaaaaagtcatcggtacttttatcaaaaaacatntattctattaattattgccatcacctttttcttattgacaacattactctgctgattgttaaaatctaacctgtattcagggttacgattctatacaatagaacagggaggggaaaggatgtcatcgttaatgagactttttgttaatgtcaacaatgctatgaatttattttagaaaaacaattaagctgacgtagtgttccgtctaaatgacggggcgatattaacatgattagaacaagaggaattttatgttatcttcattaaatgtccttcaatccagcttcagaggaaagacagctttatcaaatagtacacttctccagaaagtttcttttgctggaaaagaatatcctctggaacctattgatgaaaaaacccctattctttttcagtggtttgaagcaaggccagagcgatacgaaaaaggagaagtaccaatattgaataccaaagaacatccgtatttgagcaatattataaatgctgcaaaaatagaaaatgagcgtataatcggtgtgctggtagatggaaattttacttatgaacagaaaaaggaatttctcagtcttgaaaatgaatatcaaaatataaaaataatctaccgagcagatgtggatttcagcatgtatgataaaaaactatctgatatttaccttgaaaatatccataaacaagaatcataccctgccagtgagagggataattatctgttaggcttattaagagaagagttaaaaaatatcccagaaggtaaggactctttgattgagtcatatgcagaaaaaagagaacatacttggtttgattttttcaggaatttggccatgttgaaggctggaagtttgtttacagagacgggaaaaactggatgccataacatatcgccctgtagcggatgtatatatcttgatgccgacatgattattaccgataaattaggagtcctgtatgctcctgatggtatcgctgtgcatgtagattgtaatgatgagataaaaagtcttgaaaatggtgcgatagttgtcaatcgtagtaatcatccagcattacttgcaggcctcgatattatgaagagtaaagttgacgctcatccatattatgatggtctaggaaagggtatcaagcggcattttaactattcatcgttacacgattatnnnnctttttgtgattttattgaatttaagcatgaaaatattataccgaataccagtatgtataccagcagttcatggtaagtcttccggttgtggttgaaaaatatcgttctttaggtatagattcagatgattaatcctgttactaatactcagggcgtgtcccctataaatactaaatatgctgaacatgtggtgaaaaatatttacccggaaattaaacatgattactttaatgaatcacccaatatatatgataagaagtatatatccggtataaccagaggagtagctgaactaaaacaggaagaatttgttaacgagaaagccagacggttttcttatatgaagactatgtattctgtatgtccagaagcgtttgaacctatttccagaaatgaagccagtacaccggaaggaagctggctaacagttatatccggaaaacgcccaatggggcagttttctgtagatagtttatacaatcctgatttacatgcattatgtgagcttccggacatttgttgtaagatcttccctaaagaaaataatgattttttatacatagttgttgtgtacagaaatgacagccctctaggagaacaacgggcaaatagatttatagaattnnnnaatataaaaagagatatcatgcaggaattaaattatgagttaccagagttaaaggcagtaaaatctgaaatgattatcgcacgtgaaatgggagaaatctttagctacatgcctggggaaatagacagttatatgaaatacataaataataaactttctaaaattgagtagagaagctcagccacttgtgtaggggggctaaaattaattctatttcattatatgagaacaccaataagaataataatatttgatcacaactgaagatgctttttacaatgaagaattattgttaaaaaacgctttgttgaatcaaccgaactgttgctgagttgcaggatcacatcacgtattttcctgaaaacgcaggctgcttagtagcaaagcagaagttcaaaatcaccaactaaatagctgcgccgaatagtagatcaatgaaagggaactcagcccggattgtgcgatctgatcaatcgccaaaaatccccccctaaccggactgagcgatgccgatcatagcaccaattccccgcgacgaatgacgcctgatgcaaaaagcaatctataaaactcacgataaaaattatgcccgcaggctgaccgccatgctgatgctgcaccggagcgctcgcgtcagtgacgttgccagaacgctctgctgcgcccgttcctccgtcaggcgctggattaactggttcacgctgtcgagtgttgaaggtctgaaatcattacccgcaggacgttcccgccgctggccgtttgagcatatctgcacattgtttcgtgaactgataaaacactctcccggatattttggctatcagcgttcacgctggagtacagaactgctggcaataaaaatcaacgagataaccgagtgccagttacatgccggaaccgttcgccgctggttgccattagtcgggcttgtgtggcgcagggctgcgccaaccctgcgtacccgtaacccgcataaagcagcaattcacaaagcactggacgaatgtagtgcggagcatccggtcttttatgaagatgaagtgtatatctatcttaatcccaaaaccggtgcggactggcaacttcgcagacagcaaaaacatgtggtaacaccggggcagaatgaaaaatactatctggctggtgctttacatagtggaacgggcaaagtcagctatgtgggtggcaacagcaaaagctcagccttatttatcagtctgttgaaacatctgaaattgacataccgacgggataaacctatcacgctcatagtggacaactacatcatccataaaagtcgggaaacacagcgctggctgaaagaaaatccgaagttcagagtgatttatcagccagtttactcgccgtgggtgaatcatgttgagcggttatagcaggcgcttcacgatacgataacgcgcaatcatcagtgccgttcaatgtggtaactgcttaaaaatgttcattattttatggaaaccgtgagcccattccccggtggtaaatatgggctgttaaaagtgtagcggtattcggcgcagctatttaggatgrtcaggtcgcagaagttctgtgccactacagtgcgtgtactaaacaaaatgacgagggcacgaatgtcataatacgtgcgtataacctgacagtagctaccaactgagggggcttattccaaacctgatttattcaacaaagctggacttatccttactctgaattattttccagacatatgcatcatgtactggctcgcttggttcaggaaatacaggagcaaatctacagctattagatttattcctatttgtatgcaaagtcgcattgcataatgcggagctatgttacagatacgcctgacgtgcgtagtaaaattataaagcaacatatatatacaaggagaaaccgagaaaaataaatgagtcgtatgttgggtagcatcgagataaatattttttttatcacattagcaccttggttaagggtgttaataataatattctctcacttattaaaacatannnnnnnnnnnanncggaaatgtaattatgagactgccagagaaagttctttttcctcctgtcactagtggcctgtcagggcaggaaaaacaaaaaaaaccgaagagcattaccggatttcaggaaaattatcaacgcaatatcaggccaatcaaaacagcatcagaagcccgactacgcttctttgataaaatggtttcgaaagaaaactctctggaagatgttgtttctttaggtgaaatgattcagaaggaaatttatgggcatgaacaaagaacattttcaccagttcatcatacaggtaactggaaatcatcattgttacacaacgcgctccttggtctggcaaatgtttataatggcttacgggaaacagaataccctaacactttcaacagagatggtataaaaagtactaactcttttagagataacttattgacaaaaacaagaactcccagagataattttgaggaaggaataaaacatcctgaacatgcaacaataccatatgacaacgacaatgaaagtaataaantgctnnnnnnnngaaagatagctggtaacaataacgagctgttgatggaaataaaaaaggaatcccaaagcgaccatcaaatccccctgtcagataagttcctgaaaaggaaaaaacgatctcctgtagctgaagataaagttcaaaactcgttaacaccagaaaattttgttcagaaaatttcacttagtgatgagcttaaaacaaaatatgcaaatgaaattatagagataaaaagaataatgggagaatacaatcttttaccggataaaaacagtcgtaatggtctaaaacttctacagaagcaagctgatttactaaaaataatcatggaggatacctctgttacagaaaatacctttaaaaacatagagatggctatagcagatataaaaagggagtactattcgcatacagttgatattgagaaaaatattcatgccatatgggttgcgggttccccacctgaaagcatctcggactatattaagacttttctcaaaacctacaaagagtttacttactatctttgggttgatgaaaaagcatttggagccgcgaaatttaccagtgtcttaaaacaaattgcatttgatttagcatgcagaactatacagcagaatactccacaaaaaaatatnnnnnntattaatctatataatgaaataaggaagaaatacaacaacaacccatcgggacaacaagagtacttaaacaaactcagagagctttatgctacttatcaaaaaatatccacccctctgaaacacatgtttaattcattttttttagaaaacatgattaaacttcaggataatttcttcaactattgcattgtcaaaggtgttacagagattaatgatgagttacgaataaactaccttaaaaatgtaataaaactgtcagacgatgacattggtaattatcagaaaacaattaacgacaataaagatagagtaaaaaaactaattcttgatttacagaaacaatttggtgaaaaccgcatttcaattaaagatgttaactctttaacctctctttcaaaatcagaaaataatcacaattatcaaactgaaatgttgcttcgatggaactatcctgccgcctcagacctgctcaggatgtatatccttaaagagcatggtggtatttatacagacacagatatgatgcctgcatactctaaacaagtaatttnnnnaattatgatgcagacaaacggagataatcgtttcttggaagatttgaaactacgtcgtgcaatatctgatggtgtattaagatatgttaataaccaaaatattgatgaagttaactannnngaaatcagtgatgcagataaaaacattatcaagaagatattaacagaaatatctaaaatgccagaagatagtatttttactaagatcaatacaaggattcctcgagacacaatgcccatccttcgtcgttatcacctatggcctgatggatggaatattcgtgggctcaatggattcatgctatcacataaaggtagtgaagtgattgatgctgttatcgcaggccagaatcaggcttacagggaactaagaagaataagagataatattcatagtgaaatatacttcaaacaaactgatgaattgtcctcacttccagatacagacaaaattggagggattctggtaaaaaaatacctttcaggaagtcttttttcaaaattcagacaagatactattatcccggaggcattgagcaccctccagatatcaggtcctgacttgattcaaagaaagatgttgcaatttttcaggagtagaggggtgttaggtgaagagttcattaatgaaagaaaactgagtgataaagcttatattggtgtctacaaaacaactggcacagggaaatatgactggttaacccctgaatcgatcggcgttaatgatgtcacgcccgcagatgaaagtacctggtgtataggaaaaggccggtgtgttgatgacttcctgttcaaagatgtttcaacactaaaaacagaaaatcttccagaattattcttaacaaaaatagatactgatacgtttttctctcagtggtcaaccaaaaccaagaaagatctgcaaaaaaaaatacaagaccttactgtacgttataatgagctaattgactcgtcgactatcgactttaaaaatctntatgaaatagatcaaatgctccatatgattatgctagagatgaatgatgatatagccaaaaggtcattgttttcattgcaagttcaaatagccgaaaaaattcggaggatgaccattcctgtagacaatataattaacatctatcctgatctacataaaaaaaatgacaatgatctgagtatgtccataaaaggctttcttgcgagtaatccacatacaaaaataaatattctttatagcaataagactgagcataatatttttataaaggatttattctccttcgcagttatggaaaatgagttaagagacattatcaataacatgagcaaagataagactcctgaaaactgggaagggagggtaatgttacaaagatatctcgaattaaaaatgaaagatcatcttagtttgcaatcttctcaggaagcaaatgagtttcttgaaatatctacttttatttatgagaatgatttcttgagagaaaagattgaagcagtaaaaaacaaaatgaattctcacgaacttnnnntnnnnaaaataaaaaaagaacaaaacacatggcaggatctgtccacaaaagaacaaaaattacagcttattaaagcattgaaagaaatttcaggaaatacagagaaggactctcattacgatagacttcttgatgcttttttnnnnaaacnnaatgaanntatnnataataaaatacaaagaataaaagacgagttcaaggaatactcccgtgtagccattcataatatagataaagttatatttaaagggcaaacactggatcgtctttatcatgaaggatatgtattttctgatatcaataccttgtctcgttatacactacacggactaggaataactggtgtacatactgaagaaaacctgctaccagctccttcatcgtccttaattaatatattgaaagaacattataatgaagatgaaattagtgcgaaattaccactagcatatgattacattttaaataaaaaagaatcaagctctattcctgttgaaattttgaacaaactttcagagttaccaccacatgaactactcacacctgttcttggccagagtgttaatcctctgggcatgggctactcatccgataatggaaaaatcacagagcaagtaatagtcagtggagctgatggatttgataatcccatatctggacttatatatacctatcttgaagatctatataacatccatgtaaggatgcgagaaggtacactaaattcacagaatcttcgtcagcttctggaaaactctgtttcttcatgctttttgactgagcaaagtattaataaattacttagtgaggcagaaaaaaggccttatcagtctttaacagaaatacatcagcatctcacaggattaccaactattgccgatgcaaccctttcattactttctgttggattacctggtacgggaaaactattgcgcagggagcaggactatgggcgtccaccagttacagcaattcaggattccacatttgtactcccttataatttcaaaggtattggttttaacgataacattatatcctctgcacctgtagcctcctcattacattttatcgctgaacatgcgaaatatactttattgtcatggcctgagttttatcgtcatcatgcacagcgatggttcgaaatggctaaaggatatggaagccagaatattgattttcaccctcagtctctattggtaacccaagaaggacgctgtatgggattagccttactttatttacagactgaagatactgctcattatagcattctccaggaaaacctaatgactgtgagtgcacttcatcagaccagtaatcgcgataagttgccactgtccaaagatgataattccttaatgacaagaacttatagtctgattgaaatgctacagtatcagggaaacaaatatattaccaacgaatcgctactacataagaccgcatggaaccaagaaagaataactttattattcaatgaaaaaggagttaagcgagccctgataagcacgcctaatcatactctggttctgcaacaactggaggatatttaccggctcactgatccaaattttgggcatgcagatttcctttcacctatagatgctctgaagtttattgaggctatgatacaattaactccaacacttcaggaatattatggcctattaaacaaagacattaataaacatatacaagtacattatgccgaatcagatatggtctggaataagcttctgccagaaaatgatgctggactgagcaccagaattcagcacaccaccaccgaccgtctggcgaatctggctgaaccagtcgctgttgcaggtatctccctgccagtaaaaacactttatgatatcggagccacccttgacggtcggcgcatcacctctcctccaacatcggagcaaatcccttctctgcgtctcaacggtgatgttctgaatgattatctgtcccgcacagttctgactccagaacaggctgataacataagaaaaatactgcacactcagggaatacgcagcggtacccgtcccatagatccggagatgattcgtgggacgcaggatgacctagtttcgtcacagactcgtctgcaaaggcaagcaacacgggttaaacagcaactcgccggtgtacttgatactctgcaacagcacttccagaacattccacgttcatccggtcgtcatctttctgtagagaatattgagctggctgatatcggaagtgggcgtttcaaccttcaaattcgagatggagaaacattgcataccacttctgtggaagtaccggaagttgtgtcccgttttcagaaactttctaccatgctttcagccctgcctgccagtggaatcatggatttcgacctcggcatgagtgtagtcggagtcgtccagtatgcccgcctgctacagcaggggcacgaagacagtaccctagccaagataaatctagctatggatatcaagcaactttccgaagcaactctcggcagcatgattcagattgccgggaataagtttctcaatacagaaggaatccaggggttcagactggaaagcgccgtcgctgaaggtatgcgctcagtagcaacccgtaccggaggcacaatggggaaagccctttctgccagtgcccgtgttcttgaactgcctgtactggaaacagttctggggacatggaacctgtacaacagcgtcattcagctccagcaagctacatcttattctgagacaatggctgcccgggtacagattgcgtttgattccatttctctgggattaactgccgcttcggtagctttcccgccactaattattgccactggccccattgcggctattggtatgggagcttccagtattgcacgtaatgtggcacggaaagaagaacggcatacacaatggctggaatataaaaaattcctgactgatggcagtaaacacattgttgtggcctctccggaaagaggtctgctggatttctccggaaacaaagtttttggaaaaatggtgctggatctgcgtcagtctcctcctctcttgcatggagaaagctcttttaacgctgaccgcaaaatcggtcatcgtccggatctgggggactggcaaattcgtgagaaggtggggtatgccaacagtatcagtccctactcttctctggcgcacggttacgccaacagtaaatggccacgaacaataccgaaaattccctcgggagaatatgacaccataattctgggctacggtcaccagtatcaggccaatacggaaatagaatatctgtctaactggattgtatggcgggaagccgtaccagacagtacttcccgccacaaacgtcctcctctggaggttcttaatagtcagtgtactgtgatagctggagagcgtaaaaccacagtacttcccctgagagtgctcagcgatctgacaccggaatgcacagaacaggctatatcgttaaaagattataaattcatactgagagggggaagcggtgggctggctgttcaggtcggtggcgcgggatattatgatattgatgcaaatcctgtggcaaaagaaaatacgctctcttttcgcgggctaccggaagagtttccgctcacctttgatttatcaaaacaaacacagtcggtcatgctgaaaacaccagacgatgaggtgccggtaatgaccattacccagaagggaataaacaccctggtaggtacagccgccggtaaagaccgactaatcggtaacgataaggacaataccttccatacaagctctggcggcggtacagtcatctccggaggcgggaataaccgctatattatcccccgggatttaaaaacgccgttgacactgacgctgtccagtaactcagtctctcacgaaatctttctgccagaaacaaccctagctgaattaaaacctgtcgcctttgagctgagtttgatttactgggccgggaacaacataaatgttcaaccagaggatgaagcaaaactgaaccactttgccggaaacttcagggtgcatacccgtgatggcatgactctggaggcggtttcccgggaaaatggtattcaactggcgatttcattatgtgatgttcaacgctggcaggctgtttatccggaagaaaataacagaccggatgccatactggacaggctgcatgatatgggctggagtctgacaccagaagtccggttccaaggaggagaaacacaagtcagctatgatcccctgactcgtcagctcgtttaccagcttcaggcgcgttactctgaattccagttggccggtagtcgccaccataccacggctgtaaccggaactccgggaagccgatacattatcatgaagccagttacaacacagatattaccgacacaaatcatactggctggtgataatgaccatccggaaacgattgatttactggaagctagtcctgttctggttgaagggaaaaaagacaaaaacagcgtgatattaacgattgctacgattcagtattcccttcaactgacaatatccgggatcgaagaatcgctgcccgagacaacccgtgtggcaattcagcctcaggatacccgtttactgggtgacgtactccggatcttaccagataatggtaactgggtggggattttccggagtggtcatacaccaacggtaaaccggctggaaaatttgatggcactgaatcaggtaatgacgttcctgccccgggtatccggaagtgcagagcaggtattatgcctcgaaaacctaggtggcgtaaggaaaaaagtggagggggagttactgtcagggaagctgaaaggtgcgtggaaagccgaaggtgaacctactgttccggtaaatatctcagatctaagtatcccaccctattcacgtctgtatctgatttttgaagggaaaaataatgtgttgctacgcagtaaagtacatgcagctccgttgaaaataacatccgcaggagagatgcagttatctgaaaggcagtggcaacagcaggaacatattattgtcaagcccgacaacgaagccccctcattaatactcagtgaatttcgtcgtttcactatttcatcggataaaacattttctttaaaactgatgtgccatcagggtatggtccgcatcgaccgcagatcattatcggtcagattgttctatctgcgtgaacagccaggtatcggcagtttacgtctgacgttcagagattttttcacagaagtgatggatacaacggacagggaaattctggagaaagagctgagaccaattctgataggagatacacaccgctttatcaacgctgcatacaaaaatcatctgaatatccagttaggagatggcgttctgaatctggcagacattgttgcggaatacgcccgtattcaaaaggaagaaacatcaaaaatattgtatcaatatcaaggtgccatgaaaannnnnnnnnntggaccatctgtggtagaagatgccattatgaccactactgtcacaacagattcaggtgaactattccctaccttccacccgtggtatacagatgatttatcagggcgttataagagcgtacctatggcaagaaaagcagatactttgtatcacctgacaccaaaaggtgatctacagataatatatcaggtagctacaaaaatggtgaatcaggcgatgattgtatccctgccaaactaccgacacgagtgggaaaaatataatttaagcatcttatccgaaatccctcagaacaataatactgttgtacattcaatcctcagggttaatggccccacaatgcaggtgcgcacaattgactacagaggaacggatgaaaacaatcccatagtatctttttcagatacaaccttcatcaatggtgaacagatgttgagttatgactcgcattcatcagggcgagtctattccagagaagaatatatgatgtgggaattgcagcaacgggtatcagaagcttccagtgcccggacacaggattactggctgatggatgcagcggtaagaaacggagaatggaagatcacaccagaattattacgtcacacaccgggatatatccggagtacggtatcgaaatggtccagaggatggctgaaaaccggcacaatactccagactccagaagacagaaatacggatgtatacctgactaccatacagaacaatgtatttagtcgtcaggggggcggctaccaagtgtattatcggattgatggaatggctggtgcggatatagcggataatgcaccaggggaaacccgctgcaccctcaggcccggaacatgttttgaagtgacaagtgtggatgaaaggcattatgagtggaatatcatttatgtcacgctgaaaacctgtggctggagccgaaatggccaaagcaaaacgccgaatggtgacaacctttttaactaattaaaatctctgttaaagatgtataacccggcatctatgtgctcaccagcatatagatgcaatgtgattcccctgatggtcgtatcagagatggtatgcgagcctgtacatagatttgtgtaattgcctgattttgatatgttcaatccaacatcaaaagcaggttaatttatggacgaaaaacagttgcaggctctggctaacgaactggccaaaaatctcaaaacccctgaagatctcagccagttcgatcgcctgctgaagaaaatcagcgttgaggcagctctcaacgctgaaatgtcccaccatctgggctacgataaaaaccagcctaaaccgggtgccaactcccgcaatggctattccacaaagaccgttatcatcggtgatggccccctggaactacgcactccgcgcgatcgtgatggctcttttgaaccgcaacttgtgaagaaaaaccagacccggatcaccgggatggataaccagatcctgtcgttgtacgccaaaggcctgacaaccgtaagcgtacagcctgaaccgtctggtcagaatctgacgaattagagtaagcgtaaaccgaccgccgtatgtagccattagacaagaattggtaacttagacgcccatctgacacagacggacatctaagtatggaattacaggactggcgaaaagaacctcgtaaaaagtattcgaatgaattcaaacttcgtatggttgaactggcatcacaacctggagcttgtgttgcacagattgcacgagaaaatggcgtcaatgataatgttattttcaaatggctcaggctctggcagaacgaagggcatgtttcgcggcgtcttccggtaacaacctcttctgacactggcgttgaattattacctgtagaaataacgccggatgagcagaaagaacctgtggcggccattgcgccgtctttatccacttccactcagaccagagtcagtgccagttcctgcaaggtggaattccgtcacggtaacatgacgctggaaaatccatcgccagagctgctcacgatgttnatccgcgaactgagcgggaggggaagatgatttcactcccatcaggtacccgtatctggctcgttgccggcgttaccgatatgtgtaaatccttcaacggactgggagaacaggtacaacatgtgctgaatgataatcccttctccggtcacctgtttatcttccgtggccgacggggggacaccsttaaaattctttgggctgatgctgatggtctgtgcctgttcaccaaacgcctggaggaaggccagtttatctggcctgcggtgcgtgacggtaaggtatccattacccgctcgcaactggcaatgctcctcgataagctggactggcgtcagccaaaaacatcccgccttaacgccctgacaatgttgtaaaaaacacctggccgcattataaaaacggccatgagtcagaaatacctcattcgcattgcagaactggaaagccagctccgtcagaaagaccagcaactgagtctggttgaagagacggaggccttcctgcactggcacgtgccgaagaaaagatcgaagaagatgaacgggaaatagaacatctgcgggctcagatagaaaaactgcgccggatgctgttcggtacccgttctgaaaaactgcgtcgtgaagttgaacaggctgaggccctgctgaaacaacgcgaacaggacagcgatcgttacagtgggcgggaagacgatccacaggttccccgccagttgcgacagtcgcgccatcgtcgtccgttaccggcacaccttccccgtgaaatacagcgtctggaatctgaagaaagctgttgcccggagtgtggcggtgagctggattatctgggggaagtcagtgcagaacaactggaactggtgagcagcgccctgaaagtgatccgcacagaacgggtaaaaaaagcgtgtacaaaatgtgactgcatcgttgaagcaccggcgccgtcccgcccgatagagcgtggtatcgcgggccccggattacttgcccgcgtgttaacgggaaaatactgcaaacacctgccactgtatcgtcagagtgaaatctttgcccgacagggtgtcgaactgagccgtgcattactctccaactgggttgacgcgtgctgccagttaatgacgccgctgaatgatgccctgtaccgttatgtgatgaatacccgcaagcttcacactgacgacacaccggtaaaggtactggcaccgggcctgaaaaagacgaaaacagggcgcatctggacgtatgtccgggatgatcgcaatgcgggttcgtcatctcctccggcggtctggttcgcgtactcaccgaaccggcaggggaaacacccggagcaacacctccgccccttccggggtnnnntgcaggcggatgcgttcacaggttatgacaggctgttcagtgcagaacgtgaaggtggtgcgctgacagaagttgcgtgctgggcccatgcccggagaaaaatccacgatgtatacatcagcagcaaaagtgcgacggcagaagaagccctgaagcgaatcagtgaactgtacgccatcgaggatgaaatacggggattaccagagtcagagcgtcttgcagtcagacagcagcgaagcanagcgttactgacgtcgctgcatgaatggatgatggagaagaatggcacgctgtcgaaaaaatccagactgggcgaagcgttcagctatgtactgaatcagtgggacgccctctgttattacagtgatgacggactggcggagacggacaataacacagcggaaagagcgcttcgtgcagtctgtcttggaaagaaaaattacgtgttcttcggtagcgatcacggcggcgagcgtggtgcactgctatacgggctgatcnnnncctgccgtctgaacggtatcgatccggaagcgtatctgcgccatattctgagcgtactgccggaatggccctccaaccgggttgatgaactcctgccatggaacgtagtactcaccaataaataagcgtcaatacggtgctccgttgacgcttaccttctttcattcgctgaaggtggaatgtatctacggggaacgctttagcagccgggaaataatgcgggaaacggtgtttaattatatcgagtgtgattacaatcgctggcgtcgtcacagtgcctgtggcggtctcagcccggactgtcttgcactgcaaatattcagaaatgagtctatgcagttcaccagtaaaatcagccatcagagagggaannnnnnnnnnnnnnnnnnnnnnnnnnnnnnnnnnnnnnnnnnnnnnnnnnnnnnnnnnnnnnctcaccgatggtcatcgcaacacgacgccagccaatcatggtgccaatgccgagcgccagtgctactgccatgatgatccacaccggagcgtactcaatggtgcttaacatatcgctgcgcagttttttcagcaggttctggtcttctttactgacgcctggcagtttcgccagcttcgcggaagtatcagagatgcacagcataatgcggcgcagctggctgcgctgactcacgcttaacggctcgtaactttccatattgcctggcagcatcgttttaacgcgcgcaatcgcatcaaaggtatttcccggatgacagtgaaactccgtcacttgcgcgccatcagtagatgccgcaggcaatggaggttccatcgcaatcaacttctgcggcagttcaggatgctgttgcaggtagtgttcgaagttggtaacggcatcgcgggtacgggtaatttcatagccggacgcgttcatattgacgacgaagccagcaggggcaatccccaccagtaccagcatcaccaggccgatccctttttgtccgtcgttcgcgccgtgcgaaaacgccncgcccgcagcggaaacaatcagcgcaatacgcgtccagaatggcggcttacgtttgccttttttctttttgcgatcttccggaatgcggtgaatacggtcacgctttttcgttccgctccagtagcgtcgcagcaggaatatcaggcctcccgcaatgaccaggccgacgataggggaaacaatcagcgaggagaaaattttggtcacttcacgcaggtttaacgcatccatcaccgatgagccggttaacagcgcgttggttaaaccgatgccgataatcgcgccaatcaaggtatgcgaactggaggccggtaaaccaaagaaccacgttcccaggttccagataatcgccgccagcagcatggaaaagaccatcgccaggccgtgggttgaccccatattcagcaacaaatcggttggcaacatatggacaatggcataggcaacgctaagtccgcccaataacacgccaaaaaagttaaaaaatgccgccatcaccacggcaagctgtggctgcatggcacgagtataaataacggttgccaccgcattcgccgtgtcatgaaaaccattgattgcttcgtagaacaacacaaatgccagagcaagtaataacaaaagccctgtgtatatatcaaggccaacaaanaaatttagcatatattagattacgccattttgaatttacgaacggacgcattatcagtgactttaacggtgtgggcaaagtgaaatatcattntttaacgataaaaagagtgttatttcttgtgtatcagacaataagcattcattaaaaatctttagaaataattagaacacaggcattctgctggttaatgtattcacatatgaaatgaataaatatttgaacatataaatattgaatattttgattaatccccgtactgactattcttcataatcagtacgggattgctacaacatgtattactctttcaccacaattaacggttcaatatcactctcttttttaataaccagtgattcatcaccgcgcaaacacgtcccaccgtagttgccgccaacggtgaaggtacatacctgaatgtatttaccgtccactttcggcaaacaccacagttgctgatagatgtttttctgctcggcaaatttaccactggttttgtccagcacctcttcatgatggctgacgaggtcgatgttgctgccacagcgaccggcgatcggtttcactgcgtaacctgttttcaccaattcatcattaacagtgaaatcggtatccagcaggtaacgatggtgcgggaacagcgaccagaggatcggcagaatcgctttgttgccggggatcaccgtccacagcggctcaaagaccagcacttccgggcgcagcaatacgtcgataagacgcacttcattttgcggatgaccggtacggatcggcaccgcagcaaactcacggtcgctaacttcacgaatctgatcaaacgcggtttcccacgcccaggttttccacacgcagttaaccagtcgcccttccccatcaatcagttgcccggcagcatcccagcccagttcatccagcccgcgcaagatacgcgtttcaaagcccgcctggtgcagcgcctgctccataaactgcgcgtgatagttttcctcgatatctttgtcctgcatgatatggacaaacggacgtgcacgactgtgtttccaggcaccagccagttcgttaatcagcccttccgccggattgaagccgttgcctttatagccctgctccgcccaacgttcgaggatcaagcccgcttcggtatgacaggaggcggagtcggcgttgtactcgtaaaccttcagaccacgctcatccatgcagaaatccatacgaccggtgatcatatggtgacggcgacgctgccaggagagacgcaaacgtggccagaggattttcggaatgtcgaacagcgccagcaggttgtcatctttcagcaccttttcggttgcgtgaagatacatcaggtgcagctcgttggtggctttaatcagctcctgctcggcgctctcggtaatggtgtagtaatgatacggatcctgattgatcacctgaccgttggcctgcacataggcgttttgcagcggatctttttcatccagccatttaccgtcaaactggcctttgttttccagacgcgctccgctgattttcagcagctcgcctgcaatttccggctgcggtaagctgtattcagtatcttccgtctggatcatccagcccagaatggtggtgtcatcaaaagtgtctttaagggtatagcagccgttttcgaccaccatctccagttcgcgcgtccactgttgcccttgcggcaacggggaatgaatcacgttctgttccgcaatacggactttgttgccatgtaattgggtaatgatggcgacatggccagtgtctttaaattcaccgcctttatcccagataagaagcgcacccgcgaccggcgcacgcggcgagccgttaggaaatgcctgcaatggcaggatgttgtcattaaccacttcacgcaggaagcgcagcgagaaaatctcccacgccatacccacgtcagtaaagaccacaccgtagttcagaaagagaaaacggcgagcaaattcaacgcattgccatttgtggcccatatattcgtcgtcgatatagctacggaatacggcgtcatcttcgtattcctgcggatcgagagaactgtaatctgaagagtagattgctaccccacctggggcgtagcccaataatgtcccgaacggggcatcctggctggtcgttcctttgctcatcactttacctttaacaatacaacctaagcagttggcgtaattgttgtgctctgattacctgctcagcgacattaaccggacagaggtcagactaatcatacacctcatcgcagcggctggcgcaaagggttaaaaaattcacattctgtacagcaagtgacctgctacactgcttcaacactaccactcagaaggcaactcactatgacagacaatacttatcagcccgcgaaagtctggacgtgggataaatccgctggcggcgcgttcgccaatatcaatcgcccggtttctggtccgacgcatgaaaaaacgctgccggtgggcaaacatccattacaactttattcgctgggaacgccgaacggtcagaaagtaacgattatgcttgaggagctgctcgcgctgggcgttactggcgcagagtacgatgcctggctgatacgcataggcgatggtgatcaattctccagcggctttgtcgaagtgaacccaaattcgaagatcccggcgctgcgcgatcatacccataatccgccgatccgcgtgtttgagtcaggatcgattctgctttatctggcggagaaatttggctacttcctgccgcaggatctggcaaaacggactgaaacgatgaactggctgttctggttacagggcgcggcaccgttcctcggcggtggttttggtcacttttaccattacgcgccggtgaaaattgagtacgccatcaatcgctttaccatggaagccaagcgcctgctcgacgtgctggataagcaactggcgcagcataagtttgttgcgggcgatgagtacaccattgcggatatggcgatttggccgtggtttggcaacgtggtgctcggcggcgtgtatgatgccgcagagtttctggatgcgggaagttataaacatgtgcaacgctgggcgaaagaagtgggcgaacgtccggcagtgaagcgtgggcgtattgttaaccgcaccaacgggccgctgaacgagcagttgcatgagcgccatgacgccagtgattttgagacgaatacggaagataagcgtcaggggtaaggattggtgttcgtcgcagcaagccatccaggccggataaggngttcacgccgcatccggcaatcgagcacaatgcctgatgcgacgctgccgcgtcttatcagacctacgaaagctaatcatcacgcgctggtaatgtcgtaatccatttggcgcagtgcgtctaatgtggctttggcttcatcttcgtcgatgatgctcatggcaaatccgacgtgtaccagcacccactggcccagcagatcggcagggttaccttcacaaatcagggcgatattcacgtcgcgcttgataccacatacttcaacctgcgcaagctggtgaatatcttcaccgacagccagcacctggcctggaacgccaatacacattgttaactccggttattcaacttcaatacttttgacgatcagcgaatcgccggtatcgacacgcaaccgctcgccgtgacagagcggacactgcgcatcgtgctgatgaacctccaccacctggctgcaatcccagcaccaggcctgggcgggtttatagacgatatgtaaatcgcacccttgcgccaccgttccgtggcagacaatttcaaaactaaaacggacggcgctctcctcaacgcaggagagcgcgccaatttccagccacacggcggtgacgcgcttaacatcgtgctgctccgcctgccgctggataatttcaacggcgctctggcaaagcgacaactcatgcattttcgccactcctgcgaccaaacagcagggcgcgacgccctgcgtgtggtacatccggattcgtgactggcagcgaaaggatcattcgtgcgcagtcatccgtcaggcgttggccctcttcaatcgacatactgtgcgaaagcggtgacatcagcgaacaggagaggtattgcgaaacaccgtccagttcgccaacggtaaaggtcatggtgccatacggcagttgcagaccaattttttcactcactttgcgcagcggccagagttgatccgggccggggaagataactgcactcagcatccacggggtgatcacacaccccgtccactgaccttcgaacagcgtaaaatcagaaacatacaccggcattgaaggatgcagaaaagagagatcgtgcatcgaacgccgggcaatttcttcaaacgctgcctgtacttgcgccttcggggaggtctggaaacctgctatctcttcagtcatgaatcgcctcccgtgggatggcttccacgccagattcacgcagcgcagccagaacctgctcaagcgcaggttcaatcattgcttcaaccgtcggcgttaagccgatgtgtggctccagcgattccggaattacnccgaccagggtcagctttttcggaaactcgccggtgaagcgcagggccgacaagacgtcggccaggccaagctgatgcggagagattttgttggtaaacaacgccggaacttcttcatcccgcaggatcatcatcgttcccggcgcgctcttcttcgacacaatggcatccgcaataatcagatgatcgcgatttgccatgtcgccaagcagctccattcccgccgtgccgccatcgaggatctcaacataatccggcagaatgtatcgttgctctaacgcttcgacaatccgcacaccgatggcttcatcggtcagcaaaatattgccgacccctaagactaaaatacgcattacagaaccttcactgaaaccacttcgttgccgtcagcatccactacgtgtaccgcacaggccatgcacgggtcgaaggagtgaatggtacgcaccacttccagcggtttattcggatcagcaaccggtgtacccaccagcgactgctcgtaaggaccgacgtcatcattgaagttacgcgggccagagttccaggttgatggaacaactgcctggtagttgctgatgataccgtctttgatcaccatccagtgagagagcatnccgcgcggcgcttcgaggaagccaacacctttgaactcacccgttgccggaatgttcggcttcacaaaggtggtgtgatcgcctttgccgatattggtgatcagtgcactgtattggttttgcaggatatcctgcaattcacagcagtgaacggtacgaccaataatacggcccagcgtggagtgcagctgtgccacttccagcgtgttgccagtcagtttctgataaatcgcaacgatttcattcagtttgttctgggtagattcgcgacctgccgccagtttcaccagcatattagccagcggacccacttctaccgttttgccgtagaaagtcggtgatttcacccaggaatatttcccgtcgtcagaccaaccatcataagccggaatggtggtaccttcccacggtgcctgcggcgcttcgtctttataccaggagtgcttcgcgctttcctgaatgcctttgatcaggtattcatcggaatgagaagtgatcggacgatacgaggacagatccgcattctcaatgtagccgcccgggaacaggaagctgccgtttttactgtcggtcgggaattccggcacgctcaggtagttcaccgcacctttaccgcacgtcagccattccgggtagaacgcagcgataaccgcagtatcgaccttgtaaacctgctcaacaaagtcactcagcttgtcgatgaaagacttgatgtacatcaggcgctcaaggttcagcacgcccagaccgtcgaggttgattgggttagcgaccccacctaccgccaggttctgaatgtgcggcgttttaccgcccagcagcgccacgacgcggttagcgtcacgctggcactccagcgcctgcaggtagtgcgctaccgcaatcaggttcacttccggcggcagtttcatcgccgggtgaccccagtagccattggcgaaaatacccaactgaccgctggcaaccagatctttgatcttgttctgaactttggtgaantcttccggactgttcaggtgccaggtcgaaacacctttcagcatttcggaggctttggttgggtcagcttgcagtgcagaagtgatgtccacccagtccagcgccgaaagntgatagaaatgaacgatatggtcatgcgtggtgtgcgcagccagaatgatgttacggatgtattgcgcgttaaccggaacgtcgatattcagcgcactttctgccgcacgaacggaagacagcgcgtgagtggtagtacatacgccacagatacgttgcacaatcatccatgcatcgcgcggatcgcggtttttcacgatctcttccatgccgcgccacatggtaccggaagcccatgctttcgaaacgacgccattttcgatttcgcaatcgatgcgtaaatgcccctcaatacgggttaccggatcaatagtaattctctggctcatgctttgctcgcctcatgacgattatgatcgttttgttttaaaggaggaagtatcggcagtagacgaatgagtacgatgtaagcgcaaatctcaatagccacaaaaccaatagaaatcaacagttcttcccaggtcgggaagtaggcgtaaccgccgcccgggttgaatgccaccagcgaataggtcagacgccaggttgcacaacctaacagcgcgctcagtgctgacaggaacagcatgcgggaatcattacgcagcttcgccacacgcagaacgaccagcgggaagagcatcagcaggacttcaatccagaacatcacggagtagaagtcaccggcaaacgctaacgacagcttgtcgcgatagataagctcgccaaagcgcagcacgatgaaaatcgccagcaacacactgatggtgttggtcagcttgacgaataggctcttttcatccggaccgttgccacgcagacccgcctgcaccagtgaaccttcaaagatgacaatcgagaagcccatgatgaacgccgtcagcagcgagaacagcggcaacatttcatagctctgccacagcggatgcaccttgtagcccgccgagatcatcagcgaccccattgaagactggtgcatggtcggcagcagcgcaccgagcgcgatgatgaagaacatcaccttgttcagacgctgtagcgacaccttccagcccagacgttcaaacagtgccggagcaaactccagagccatcacgccgatgtagatggtcatacagaccgccgtctcgaacagtaccgagttcacgttgaagtgacccggaatgtagaagtacggcaggttccagtagcgacccacgtcgatagtgatcgacaagccacccagtgagtaaccaaacagactcgccaacagcgccggacgcaccagcggatggtattgcccacggttaaagacgtataccgcccacgcaagcgcccagccgccacaggcaaagccggtgccaatcagcaggtcaaacgcgatccacacgccccacgggaagccgccgttcaggtcagagacagagcccagaccgaacaccagacgcttcacaatcaggagcatacagatgacgattaacggtccaaaaatcatgaccggtttactgatgattttgccgcccagcggttgtggatcatgactcatgatcgtctcctccgtcgtgatggtcgtttttggtgttgcgacgaaccagcacggtcaagcccgccagcacagccagtggtagcatcatgcctttatacagggtgtgttgaatattttcggaacgcgcaccggtagaaagatcgtccagtttcggcaggtcgagattttcataaggcacacccgtcagtaccagaacctgagtaccgccgccctctttctcgccgtacagatgcggataatatttcggcaccgtatgcaggtaagtgtcgccagatttcagcgtctgacgcggatagtggtattcgctgccaggcttcagcgccagacgttttttcgcctccgccatcagctcttcacgcgtaccaaaaatcaccgcgcccgccgggcacacttctacgcagccaggcagaccgcctttatcgagacgttccacacctttctggttgcacagctcgcacttatgcagcgcaccaaacgggttgttgtagtcgtacttcggcacgttgtacggacaggcgaccatgcagtaacggcaaccggtgcacacgtctttgtcgtaatggacaatgccggttttcggatcttttttcagtgcagagaccgggcacacagagacacagttcggatcgacgcagtgcatacactgtttcttaatgtacgcgtagccnttctcctcctggtctttgttgacccctgtgccgctggtccacacttgaatgatgttattggtatacggcgacagtttgtcgttgttcgaccaggtctgttccccttgcgggttacgttcagggaagttgatatcctgacacttggtgacgcaagcctggcagcctacgcacaaggtcgagtcgtacaacatccccagcgatcccggaattggcgggcggttttcagcagccgcatgactgacagacggcagcgcgcccgtcagcaatgccccgcaggaggctgctttaataaaattacgtctgttcacggttattctccccgtgagtcagcgttatctttcttttgctgacgacccagttcacgcaccgccatcacgctgacaccggcaaccagcccaaccacaccgccgagcaaaccaatagcgcctgcagagacgttgccgccntctttagcgttaacatccggtttctgtgaacgcggagtctgattttcgacgttggcaagctgatggatgcctttatggaagccgataccttcttcgttacagccatagcacgggtgaccaatcgccaccggccacacaccgccaacatcgcagaattgcagcgttgagcagttgccgtaagtttctggccctttacagccgaggtggtacaggcaccagccttcgcggtggccttcatcaccgaactctttggcaaaacgaccagcatcgaagtgcgggcgacgttcgcagtgttcgtgaatcagacggccataggcgaaggtcggacggtttttgtcatccagtttcggcggtttgccgtaagtgatgatgtgcgcaacggtcgcgaggaagttgtgcgggttcggcgggcagcccggaatattgataacggttttgcctggcagaacttcttgcaagctgactgcgccagttgggttaactccagctgcggcaacaccgccccacgcagagcaggaaccgatagcgataatggctgctgcgccttccgccgctttgcggatgtgatccacaatcggctcaccggcaaccatgcaataaataccgttatcttttaatgggatggaaccatccaccactaacacatactgccctttgtacttctcgagagcgttatgtttgttctcttcgacctgatgaccgaaggcggcggaaagcacttcgtgatactccagagagatagtctccagtacgaggttttctaccgttggatgcgttgcacgaagcagagattccgtacaaccggtgcantcctgcgcgccaatccagataactggcggacgctgcgggttagtaaccgattcggccatctctgcagcggctttgctacttaaccccatggtggcggctaatgctgcacaaagcttcatgaaatcacgacggttaatgccgtgagaatggatgagggtgttatctccagtcatttatagttattccgttgcgaagacctggcatatattttgcctcaatcgcaaaatcaataatgcgatcgatgcgccatttaccacacatttattatggttatcgatatcatgatactgcggcggggcgctaaaacgaagggaagaagcattagtgtaattaattaaagcaagataatacgtatgtttgatcaattttcgaggcgataaccggccataaaaaagcgcaacgtagaacaggaattattctcacgaaagaaatccattaccatctctttatccagtccatagcggcgcgtcagaatacccgcttcccaggcgctaagctggcgatctccggtcttttcgtacatccggtgtgagtagcctaatacaaaaccgcgtttataatcggcacagaattttgtcacattaaccgcactgtcggcatgcgttgcttttaatcccgccattaagcctttaccaaaatggttattcatcgttcacctcattcgctatatatcgtaatatatagcgatattttaggcaaagaacgacttttgcgcacgctattttttcatgcttgtttaagacgtaatcccgtaagagataaacctatcaggagagatatttatcgaaccatttcagtgtcctttgccaggcaagatcggcggcagatttgtcataacggggcgtggaatcattatggaatccgtgattaacccccggatagatatacgcctcataaaccttattattggctttcaacgccgcctcgtaagcaggccagccctcgttgattcgggtgtccagttccgcgaagtggagtagtaaaggcgcttcaatcttcgccacatcggcagtgggtgcctgacgaccataaaacggcactgngcaggccagttccgggtaagcgaccgctgccgcgttcgatacgccaccgccatagcaaaatccggtaatacccactttgcctgtcgcttgcggatagcgttgcataaactcaattgcggcaaagaaatcattcatcagtttggttggatcaacctgctgttgcagctcacgacctttatcatcatttcccggataacctccaacggaatttaagccgtcaggtgccagggcgatataccccgccttcgccactcgccgtgccacatcttcgatatacggattcagtccacgattctcatgcaccaccaccacggctggcgttttgccgctcatttttgcgggtttaaccagataaccccgtacctcgccgtgaccatttggcgaaggatacgtgatgtactcagcaaaaatctccgggtcggtaaactctacctgagtcgccagcgcataatttggcttgagcaaatcaaacaacgctaatgccgtcatcccgcctaccgcatacttcgccgcaaggttgaggaactcacgtttcgagattttcccgtgagcgtaatagtcgtagtaatccagcaactcttgtgggaaatctttggcggttaaacgcggcatcgttgcactcctcagttggtgtttttttaagcaaagcataagcacgtgtttttgcccagtttttcgtcactctgtgagccagactacgggatacgcgctggcgaatcgctaaactagaaacattgtttcgaaattgaacggtggaaaggagaggtcatggtctggttagcgaatcccgaacgttacgggcagatgcaataccgctattgcggaaaaagcggtttacgcctgcccgcgttatcgctcggtttatggcacaatttcggtcacgttaacgcgctggaatcacagcgtgcgatcctgcgtaaagcgtttgatttaggcattacgcactttgatttagccaacaattacgggccgcctccaggaagcgcagaagagaactttggtcgcctgctgcgggaggattttgccgcttatcgcgatgaactgattatctctaccnaagctggctacgatatgtggcccggcccttacggctctggcggttcacgtaaatacctgctcgccagcctcgaccaaagcctgaagcgtatggggcttgagtatgtcgatatcttttactctcatcgcgtcgatgaaaatacgccgatggaagaaaccgcctctgcgctggctcatgcggtacaaagcggtaaggcgctgtatgtcgggatctcctcttactcaccagagcggacgcaaaaaatggtcgagttgctgcacgagtggaaaattccgctgttaattcatcaaccttcgtacaatttactaaaccgctgggtggataaaagcggcctgctggataccctgcaaaataacggcgtgggctgcattgcctttactcctctggctcagggattgctgaccggaaaatatctcaacggcattcctgaagattcacggatgcatcgtgaagggaataaagttcgtggtctgacgccgaaaatgctcaccgaagccaacctcaacagcctacgcttattgaatgaaatggcacagcagcgtggacaatcaatggcgcaaatggcgttaagctggttgctgaaagatgagcgagtgacgtcggtattggttggtgccagccgcgcggagcaacttgaggagaacgtgcaggcgctgaataatctgacatttagcaccgaggagctggcgcagatcgatcagcatatcgccgatggcgagctgaatctgtggcaggcgtcttccgataaatgacctgttaataacgggcgcgagaaccgcgcccgaatcanatcagtgattatgacgagtcagtcggtcaagatagcccattacaaatgcagagagcacaaacgtcagatggataatgacgtaccacatcagtttgttatcagggacatttttcgcatccataaagacgcgcagtaagtgaatggaagaaattgccacaatcgacgctgctactttgtttttcagcgacgttgcatccattttccccagccagttcagcttctctttgttctcggagatatcgagttgtgagacgaaattctcataaccggaaaacatcaccatcaccagcaaaccgccaaccagcgtcatatccaccagcgacagcaacacgaggatcaaatctgattccgccatcgagaagatattcggcagtacgtgaataatctcctggaagaacttcagcgccagggcaactaacgccagcgaaaggccaaagtacacgggggcaagcagccagcgagaagcatacattgcattttcaagaaaacgttccatacattcctgtcgtgtagttaaaacgggcaacagtatatcgcaattgagtaaacagcgcgcaacagcaaatcaacatatccgttaaatctttgtcgcataattctgagggttagggatcttcctggttcccttatcaacgcatcgagagcgtctacccttaaaggacgttgaacctgaagggagaaaaacgatgtctcatttaaaagacccgaccacgcagtattacactggtgaatatcccaaacagaaacaaccgacgccaggcatccaggcgaagatgacaccggtaccggattgcggcgagaaaacctatgttggtagcggtcgcctgaaagatcgtaaagccctggtgacagggggcgattccggaatcggtcgcgctgccgccatcgcttacgcgcgtgaaggggctgacgtggcgatcagttatcttcccgtggaagaagaagacgctcaggatgtgaaaaagatcattgaagaatgcggacgcaaagccgttctgctgccaggcgatttaagcgatgagaaatttgcccgttcgctggttcacgaagcgcataaggccttaggtgggctggatattatggcgctggtcgccgggaaacaggttgccattcctgatattgcagacctcaccagcgaacagtttcaaaagacctttgccattaacgttttcgcgctgttctggctaacccaggaagcgatccccctgctaccgaaaggtgcaagtattatcaccacttcgtcaatccaggcataccagccaagcccgcatttactggactatgcagctacgaaggcggcgattctgaactacagccgaggcctggcaaaacaggtcgcggagaaaggtattcgggtgaatattgtcgcgccaggcccgatctggacagcactgcaaatttccggcggacaaacgcaggataagatcccgcagtttggtcagcaaacgccgatgaaacgtgcggggcaaccggcggaactggcccctgtatatgtttatctggcaagtcaggagtcgagctacgtcaccgcagaagtgcacggcgtgtgcggcggcgagcatttaggttaaaaaaatgcccggttgtgaaaagcaaccgggcatcattgtgaattcactcttacctgatgtggcgaaaacgccttatccgcctacaaacgcatgaagattcaacatgttgcaatagattttgtaggcctgataagcgtagcgcatcaggcattgagcacctaatgccggatgcggcgtgaacgccttatccggcctacaaacgcangaagattcaacatgttgcaatagattttgtaggcctgatgaacgtagcgcatcaggcaattctactttacttcgctttggcggtttcttcgccgaccagacctatcttcaggtaacccgcctgatgcagcgtgtccattaccttcatcaacgtctcgtaatcgacagttttatccgctcggaagaagatggtggtgtctttcttgccttcggttaacgcattcaacgccgtaatcattgtttcatcggtgaccggatcgttaccgataaacatcgagttgtctgccttcaccgacagataaaccggtttttccgggcgcggctgcggcgtgctggtagaagcaggcaagttaaccttcacatctaccgtcgctaacggtgccgccaccataaagataatcagcagaaccaacatcacgtcgataaacggcgtcacgttgatatcatgcatttcgccgttatcgtcgaggttttcgttaagatgcattgccatcggacattatcctgcgcgtaatntttgtgcgacacgaaccggatgcgcagcggcgctggcttccagatccaggtcacggctttgcagcaacaatacctgcgctgcgacatcacccagcatcgctttaaagccgccaatctgacgcgcgaatacgttatagataacgaccgccggaatcgctgccaccagaccgattgccgttgctaacagagcttctgcgatacccggcgcaacgactgccaggttagtggtctgcgtttgcgcgataccaataaagctgttcatgatgccccagaccgtaccaaacagcccaacgaacggcgaaatcgcgccgatggttgccagatagccgttaccgcggcccatttgacgacctactgcggcgacccgacgctccagacggaagctggtacgttctttaataccttcgttatcgtcgctgccttctgacagttccagctcattctgcgcttcattgagcaaatgcaggcttaagcttttgctaccaaaatcagcggcgatatcgttggcctggtttaaggaacgcgcttcagccagcagttgctgctcgcgcttaaggcgacgcttctgattaaagaactctacgctcttactgaagaagattgcccaggtgactacggaggccaaaataagcccaatcatcacgcacttaacgacaatatcggcgtgntgatacataccccagacggaaaggtccgtctgcattaaattattacccactgtgtatctccaggacgcaagtcacaaaatctgcgcataataatatcaaaacgacgtcgaattgatagtcgttctcattactatttgcatactgccgtacctttgctttcttttccttgcgtttacgcagtaaaaaagtcaccagcacgccattnnnnaaaattttctgctttatgccaattcttcaggatgcgcccgcnaatattcatgctagtttanacatccagacgtataaaaacaggaatcccgacatggcggacaaaaagcttgatactcaactggtgaatgcaggacgcancaaaaaatacactctcggcgcggtaaatagcgtgattcagcgcgcttcttcgctggtatttgagagtatggaagcccaaaagcacgcgacgcgcaatcgcgccaatggcgagttgttctatggacggcgcggaacgttaacccatttttccttacaacaagcgatgtgtgaactggaaggtggcgcaggctgcgcgctatttccctgcggggcggcagcggttgctaattcgattcttgcttttgtcgaacagggcgatcatgtgttgatgaccaacaccgcctatgaaccgagtcaggatttctgtagcaaaatcctcagcaaactgggcgtaacgacatcgtggtttgatccgctgattggtgccgatatcgttaagcatctgcagccaaacactaaaatcgtgtttctggaatcgccgggttccatcactatggaagtccacgacgttccggcgattgttgccgccgtgcgcagtgtggtgccggatgccatcattatgatcgacaacacctgggcagccggtgtgctgtttaaggcgctggattttggcatcgatgtttctattcaagccgccaccaaatatctggttgggcattcagatgcgatgattggcactgccgtgtgcaatgcccgttgctgggagcagctacgggaaaatgcctatctgatgggccagatggtcgatgccgataccgcctatataaccagccgtggcctgcgcacattaggtgtgcgtttgcgtcaacatcatgaaagcagtctgaaagtggccgaatggctggcagaacatccgcaagttgcgcgagttaaccaccctgccctgcctggcagtaaaggacacgaattctggaaacgagactttacaggcagcagcgggctattttcctttgtgcttaagaaaaaactcaatgatgaagagctggcgaactatctggataacttcagtttattcagcatggcctactcgtggggcgggtatgaatcgttgatcctggcaaatcaaccagaacatatcgcagccattcgcccacaaggcgagatcgattttagcgggaccttgattcgcctgcatattggtctggaagatgtcgacgatctgattgccgatctggacgccggttttgcgcggattgtataacattgccacttttggacaattttgcagacattttattgtgaaaagtcttaaattgttgcgtccgggatcaaggcgtcccggacgattcaggagtacaataggcagataaaggcttaaacgctgttccacaggaaagtccatggctgttattcaagatatcatcgctgcgctctggcaacacgactttgccgcgctggcggatcctcatattgttagcgttgtttactttgtcatgtttgccacgctgtttttagaaaacggcctgctgcccgcctcatttttgccaggcgacagcttgttgatattggctggcgcattgattgcccagggggttatggattttctgcctacgattgcgattctgaccgccgcagcaagtctgggctgctggctaagttatattcaggggcgctggttagggaataccaaaacggtgaaaggctggctggcacagcttcctgctaaatatcaccagcgcgccacctgcatgtttgaccgccacggtctgctggcgctgctggctggacgttttcttgcatttgtccgtacgctgctgccaaccatggcgggaatttccggtctgccaaaccgccgtttccagtttttcaactggttaagcggattgctgtgggtcagcgtggtaaccagtttcggctatgccttaagtatgattccgttcgttaaacgccatgaagatcaggtaatgacgttcctgatgatcctgccaattgccttgttaaccgctggcttgttaggcacgctgtttgtggtgattaaaaaaaaatactgtaacgcctgacgattttccctgttcccggttgctgtaccgggaacgtatttaattcccctgcatcgcccgcattcttgccgcatcttcccccggcgtcacaccgaagtaacgtttaaactcacggctaaattgcgatgcgctttcatagccgacgcgcatcgctgctgcgctggccttcatgccgtcatggatgatcatcatccgcgccttatgcagacggtaattcttcaaatactgcaacggcgaggtgctggtgacagacttaaaattatggtggaacgccgatacgctcatattggcttctgccgccagttgctcgacgctcaggttttcggtgtatttattctcaatccgtttcagcacgcggctaatcagactgaagtgagtctggcgactgaccagcgccagtaacgcgccgccgcaaggtccggtcagcacgtagtacagaatttcgcggatgatctgtttgccgagaatacgcgcatccagtggtcgcgccatcacgtcgagtaaccgctccgccgcgcataaaatctcttctgataacgtggcggagttaatcccgctggctgccatcgacggctggaaatgctcatcttcgccaatatccatcaacagttcctgtaactgcaaaatatcgacattgagacgcaaccctgccagcggcacctctgacgtggcataggtttcgcactcaaacggcaacggcaccgtcagcagcaggtattcattggcatcataacgaaacacgcgttcattgatataaccgattttatgtccggaaaagagaattatgatgccaggctcgtacatcaccggtgtacgtgcgaaaggcgtctcgccatacaacaaacgcacatcgggcaacagttctgacaaactattttctttatttttcagtttattaactttatccgccagcaagcggcaaatctcttcacgtttcatatcgcgtaatttcttaggaataatgcggcaatttgattgtgcgcaattttgtagcatttctccagcactctggagaaataggcaagacattggcagaaatgagcattgagagccagggcgctggcgatcacaatgaaaaacatcaggcagatcgttctctgccctcatattggcccagcaaagggagcaagtaatgaacaactttaatctgcacaccccaacccgcattctgtttggtaaaggcgcaatcgctggtttacgcgaacaaattcctcacgatgctcgcgtattgattacctacggtggcggcagcgtgaaaaaaaccggcgttctcgatcaagttctggatgccctgaaaggcatggacgtgctggaatttggcggtattgagccaaacccggcttatgaaacgctgatgaacgccgtgaaactggttcncgaacagaaagtgactttcctgctgggggttggcggcggttctgtactggacggcaccaaatttatcgccgcagcggctaactatccggaaaatatcgatccgtggcacattctgcaaacgggcggtaaagagattaaaagcgccatcccgatgggctgtgtgctgacgctgccagcaaccggttcagaatccaacgccggtgcggtgatctcccgtaaaaccacaggcgataagcaggcgttccattcagcccatgttcagccggtatttgccgtgctcgatccggtttatacctacaccctgccgccgcgtcaggtggctaacggcgtagtggacgcctttgtacacaccgtggaacagtatgttaccaaaccggttgatgccaaaattcaggaccgtttcgcagaaggcattttgctgacgctgatcgaagatggtccgaaagccctgaaagagccagaaaactacgatgtgcgcgccaacgtcatgtgggcggcgacgcaggcgctgaacggtttgattggcgctggcgtaccgcaggactgggcaacgcatatgctgggccacgaactgactgcgatgcacggtctggatcacgcgcaaacactggctatcgtcctgcctgcactgtggaatgaaaaacgcgataccaagcgcgctaagctgctgcaatatgctgaacgcgtctggaacatcactgaaggttccgacgatgagcgtattgacgccgcgattgccgcaacccgcaatttctttgagcaattaggcgtgcctacccacctctccgactacggtctggacggcagctccatcccggctttgctgaaaaaactggaagagcacggcatgacccaactgggcgaaaatcatgacattacgctggatgtcagccgccgtatatacgaagccgcccgctaagctttttacgcctcaaactttcgttttcgggcatttcgtccagacttaagttcacaacacctcaccggagcctgctccggtgagttcatataaaggaggaacgtatggctaatccaaccgttattaagctacaggatggcaatgtcatgccccagttgggactgggcgtctggcaagcaagtaatgaggaagtaatcaccgccattcaaaaagcgttagaagtgggttatcgctcgtttgataccgccgcggcctataagaatgaagaaggtgtcggcaaagccctgaaaaatgcctcagtcaacagagaagaactgttcatcaccactaagctgtggaacgacgaccacaagcgcccccgcgaagccctgctcgacagcctgaaaaaactccagcttgattatatcgacctctacttaatgcactggcccgttcccgctatcgaccattatgtcgaagcatggaaaggcatgatcgaattgcaaaaagagggattaatcaaaagcatcggcgtgtgcaacttccagatccatcacctgcaacgcctgattgatgaaactggcgtgacgcctgtgataaaccagatcgaacttcatccgctgatgcaacaacgccagctacacgcctggaacgcgacacacaaaatccagaccgaatcctggagcccattagcgcaaggagggaaaggcgttttcgatcagaaagtcattcgcgatctggcagataaatacggcaaaaccccggcgcagattgttatccgctggcatctggatagcggcctggtggtgatcccgaaatcggtcacaccttcacgtattgccgaaaactttgatgtctgggatttccgtctcgacaaagacgaactcggcgaaattgcaaaactcgatcanggcaagcgtctcggtcccgatcctgaccagttcggcggctaacgtgcaaattctcccggtggcggtaatgttccgctaccggacttttcagaaatcatttattcccctcgcgtcccgcccgttgttactcttccttgttcaggaatgccaaatataaggacatcatcatgcagagccggaagctcttaaaagaacaactcatctatatccgggataaacgcaacgggagaggtgaaaaacagatgaaaataatacttctgtttttagcagccctggcaagttttaccgtgcacgcacagcccccctcacagaccgtagaacaaacagtccggcatatttatcagaactataaatcagatgccactgccccttattttggtgaaaccggagagcgtgcgataacttctgtgcgtattcaacaggcgcttaccctgaacgacaatcttacgctgccgggtaatattggctggattatgatccggtttgtgattgtcaggattttggcgatctggtgctagaaagcgtagcgataaccgaaactgacgccgatcatgccgatgccgttgtgcgctttcgtatctttaaagatgataaagaaaagaccacgcagacactgaaaatggtggcggaaaatggtcgttgggtcattgacgatattgtcagcaatcatggcagcgtcttacaagcagttaatagcgagaatgaaaaaacgctggccgctttagcttcgttgcaaaaagaacagccggaagcctttgttgccgaactctttgaacatattgccgattatagctggccgtggacgtgggtggtttccgactcttaccgccaggcggtcaatgccttctataaaaccaccttcaagacggccaacaatcccgatgaagatatgcaaatagaacggcaatttatttacgacaatccgatctgttttggcgaagagtcgctattttcacgcgttgatgaaattcgagtcctggagaaaaccgccgattccgcccgcattcatattcgttttacgctgaccaatggcaacaacgaagagcaagaactggttttacaacggcgcgaaggtaagtgggaaatcgctgattttatccgcccgaacagcggcagcntacttaagcagattgaggcaaaaaccgccgccagattaaagcaatgagctgaattaaatagcaattagccggaacaataaaaaagggaacactatatgaaaacgattttcaccgtgggagctgttgttctggcaacctgcgtgctcagtggctgcgtcaatgagcaaaaggtcaatcagctggcgagcaatgtgcaaacattaaatgccaaaatcgcccggcttgagcaggatatgaaagcactacgcccacaaatctatgctgccaaatccgaagctaacagagccaatacgcgtcttgatgcacaggactattttgattgcctacgctgcttgcgtatgtacgcagaatgataaaaaaatccccggcagcatgtcagttgccggggattttttttaacgtccaaccgccgctttagggcgtttcttcgcaccagcattcaccggacgagattgcgtagacgacgctttttttgccgtagcaggcgtctgacactgggtcgccatcggcgtatgtttcgtcaacgccggacgggtattgcggttctggcgacgagcctcacgcatctcttcaatggttggcgcaggcactaagcaatcgcgacggctgccaatcagatgctttttgcccattgcttccagcgcctggcggattaacggccagtttgccagatcgtggtaacgcaacaacgctttatgcaaacgacgctgtttgtcgcccttcggtacgaagacgtcttcactcttataaccaatcttcgccagcgggtttttcccggtgtaatacatggtggtcgagttagccagtggcgatgggtagaagttctgtacctggtcgagacggaaacgatgctttttcagccacagcgccaaattcaccatatcttcatcacgcgtaccggggtgcgcggagatgaaataggggatcagatactgctctttacctgcctgtttcgagtaggtatcgaacagctctttaaagcggtcataactgcccatgcccggcttcatcatcttcgacaacggcccttcttcggtatgttccggagcaatcttcagataaccgccgacgtgatgggtcgccagttctttgatatagcgcggatcttccacggcgatgtcataacgtacgcctgaggcaatcagaatctttttaatgcctttcagatcgcgagcgcggcgatagaggttgatcgtcggttcgtggttagtgtccatatgcgganaaatatccgggtaaacgcaggacaaacgacggcaggtttgttcagcgcgtggcgatttgcagcgcaacatatacatgttggcagttggcccaccgagatcggaaattacgcccgtaaaacctggaacggtgtcgcggatcgcttcgatctcattaatgatcgaatcttcggaacggctctgaataatgcgcccttcgtgctcggtgatagaacanaaagagcagccgccaaagcagccgcgcataatgttgaccgaaaaacggatcatttcgtaagccggaatacgggcattgccataggccggatgtggcacgcgcttgtacggcagcgcaaaaacgctgtccatctcttcggtagaaagcgggatagcaggcgggttgatccacacatagcggtcaccgtgtttttgcatcaatgcgcgggcgcaacctgggttagtttcgtggtgcagaatacgcgaagcatgggcgtacagcactttatcgcccttcactttctcgaaagaaggcagcaacacgtaggttttttcccacggtttcgggcgcggtggctgcacggttacggctttggcttcctgctttttcggtgccaccggtttgttatccgcgcacggcaaatcttcaccatacggatgcgggattgggtcgatttttccaggggtatcaagacgggtggaatccacgccgctccagccaggcagcgcctctttcacgataatcgcggtattacgcacatcgcggatttcactaatcggctcgcccatcgccagacggtgcgccacctccaccagcggacgctcaccgttaccaaacatcagcatgtcggctttcgaatccaccagcacggaacggcgcacggtatcggaccagtaatcataatgcgcggtacggcgcagactagcctcaataccaccgaggatcaccggtacatctttccacgcctctttacaacgctgggtataaaccagtgtggcgcgatccgggcgcttacccgcgacgttatccggcgtgtaggcatcgtcatgacgtaaacggcgatcggcggtataacggttgatcatcgaatccatgttgccagcagtaacaccgaaaaacagattcggtttacccagacgcatgaaatcgtctttgctgctccagtctggctgggcgatgatcccgacgcgaaagccctgtgcttccagcatacgaccgcaaatcgccatcccgaagcttgggtgatcgacatacgcgtcgccagtaaccaaaatgatgtcgcagctatcccagccaagttgatccatctcttcacgagacatcggcaaaaacggtgccggtccaaaacaggcggcccagtactgcggccaggagaacaggtcgcgatccggttggatcagggagatagagctcattttgcttccagaaatgataaaaaaataatcaaaggccggggattataagccggaacgaaagagaaatcgaaaagtattccatactcgccctcctcgggcgagtatgaagattacggtaccggattgactaacagttgcccaatcgagccacggtccgccatttccagcgtctgactgttgaagtagaacgggaagtgcgcccaggaaggctgaccgaaataaacaagcagctccacttgtccgtcaacccaaacggtatctttccagcctctgtcttccgggaacggcatcgcaccattcacgttacggatctggaacatcacgccttcaatatggaacgcttgcggctcgtccgcgcgtaccgtccagcgttcccacgttccttgctgcgcggtgacatcaatacggttgacgtcccacagttgtccattaatacccgggtcatcacccagactgatatcgcgactgcgaatcggcgaaccggccatgatttcagttggcagcaagcgcatcggaagactgtctgtgaccagcggcagaaggccggttgggcgcagcgttagcaccagggtagaaaccagaatgctggatggctcaaagaagccacgaatacgatcaacaatgctcgccgcttcgccacaggtgatcgacacttcatcaccgttgctcatatccaccagaatctcgcggcgctcgcccggtgccaacgaaagttgcttcaccgatacaggagcaggcaggaatccctgatcgccagaaatcacatgtaacgggcgaccatcgctcatctgtagttgatagcgacgagagttcgacgcgttcagcagtcgcaagcgcacccagccacgcgagacttcaacgtacgggctttgtacaccgttaaccagcagcgtatcaccaacaaagccgccgcttcccggttcgttgtattctggcgtaccaaagttatccagccgtttatcctggataatgaccggaaaatcatccacaccataatggttggggataggcagcgacttgctgacttcatcttccaccagccacattccggcaaggccgttatagacctgctgagccgtgcggttgggagtattggcatgataccacagagtagctgcgttctggcgaataggcagtacgggtgcccagtcagcgtttggcgacatcatccgtgccggaccgcccatcagcgggcctggtacctgtagcccggccaccgtcattgagacattttctgtcaggcggttgctgtaaataagcttaacatcgtcgcccttccagacgcggatagtcggccccaggtaacgaccattgattccccagaccgacgcgcgtgtccctggcgtaaatgaccagtgcgcacgttgtacagtcataaacagcggttgcccacggcgagattcaagcagcggcggaacgggtagcggttgctgttgcccggctgcgctggccttcaggggaacagcgcctgcacaaagtgcaatccccgatgcctgaatgaactgacgccgactgagtgacatatttgctccatgtaaaactggctaaagtaataccgtgcaggaaagtgtttcccgcaaaaatacagattgccgacttaaacttttccggcggcttcgcgctctgcgacttctttatcgagctcggcgattttttgttccattatcgaacgacaatgggcagccagctcacgaacctgatctttgccatactgactgacgtcaattggcggcagcatttcgacaatcaccagaccgttgtgcagtcgattaagattaatcttattcgaagttgtagagacgcacacgggaataatcgggacgcccgccgcaattgccgcgtgaaatgccccagtcttgaacggtagcaggccgcgaccacggctgcgggtaccttccgggaacatccagatggaaatacggcgttttttgaaatgattcactacttccgcaatagtgccgtgagctttagtgcgattgtttctgtcgatcaataagttgccggttaaccagtacaactgcccgaagaaggggatccacagcaagctctttttacctaccgtcaccgtcggcggttgcacaatgttcgatgctgtcaccatgtcatagttgttctggtggttagcgatatagatagcattgccgtagctttcagcatctgcaggtttgcggcactcaactttcaggccgaacagcggcgcaagacgaccaaacatatgcccaaaggtggccacatgtttcgggttacgcgggctgaaaaggcagtaaatggagccgaatacacagactaagatgctgtaaatcacggtaataataagacgaaagatatatagcataacaccctctgaaggtctgagagactggcattgtacgtcacctgaaatcaggttagggcattgttaaaagccgctctctggaaaagcgtattgttaatcgcaacgcatgaataaacaacggtttcaagggaatttttatcgtttccgggggttgaatacgctgccggatgacgacttaacgtttcatccggcgttccttgcaagcgggaggaaacagcgccctccccggcatattactcttcgctatcaccgctgctggcacggcgaggagagtcgatctcaacacgatcgatacgctgcaaaccgcgcatcaacgtaccgcggcgtccacgttcgccagtgactttctgtagctcttccggacgcagtttaattttgcgtttcccaacatgaatggtcagcgtgctttgcggcggcagaacgtacagttgcgccagaccatcctcgccacgcgnggcttctgccgatggaatgttgataatcttgttgcctttgcccttcgacagctgcggcagatcacttaccgggaacatcaacatacggcctgcctgagtgattgccagcagcatatcggaagcatcttcaattaccaccggcggcataacatgggcattttccggtaaggtgatcaaagccttacctgcacggttacgcgccaccagatcgttaaaggtgcagacgaaaccgtaacccgcatcggaagccatcagcagtttctgatcgtcgctttccatcagcatatggtcaacggtcgccccaggcggcaacgttaatttgccggtgagcggttcgccctgaccacgcgccgacggcagcgtaatcggatcaatggcatagctacgaccggtggaatcaacaaacactaccggttggttgctcttacctttcaccgccgctttgaagctatcacccgctttataattcaggcccggcgcgtcgatatcatggcctttagcgctgcgtacccagcccatctgcgacagcacaatggtgacaggttcagacggcagcatgtcgtgctcgctcatcgctttcgcttcttcgcgttcctgcaacggcgaacgacgatcgtcaccgtaggcttgcgcgtctgcctgcagttctttcttcagcaggttattcattttacgctcggaagccaaaatgccctgcaactggtcgcgctctttttccagctcactctgctcaccgcgaatcttcatctcttccagtttggcaagatgacgcagtttcagttcgaggatcgcttccgcctgggtttccgtaaggccaaaccgcgacatcagcgccggtttcggttcatcttcattacgaatgatctcaatcacttcgtcgatattgagaaacgccaccagcaaaccttcgaggatatgcaggcgcttgaggactttctccagacgatagttcagtcggcggcgcacggtatcgcggcggaacaccagccattcggagagaatttccagcaggtttttcaccgccggacgaccatccagaccgatcatattaaggttaatgcgatagctcttttccagatcggtggtagcgaagaggtggttcatcacctgatccatatccacgcggttggaacgcggcacaatcaccagacgggtcgggttctcgtggtcagattcatcgcgcagatcgtcaaccatcggcagctttttgttgcgnatttgcgcagcaatttgctccagtacgcgcgcacctgaaacctgatgcggcaatgcgctgataaccaccgcgccatcttctttcttccacaccgcgcgcatacgcactgaaccacgtccgttctcgtagattttacggatctcggcgcgcgaagtgataatttccgcttcagtcggataatccggcccctgcacgatatccagcagctgatcgagcgtggttttcggctggtcgattaatgcgattgccgcctgagccacttcacgcaggttatgcggtggaatatcggtcgccatgccgacggcaataccggtggtgccgttaagcaaaatgtttggcagacgggcaggtagcattttcggctcctgcaaagtgccgtcgaagtttggcacccagtcagccgtcccctgccccaactcgctcaatagcagctcggaatatttcgacaaccgggattcggtgtaacgcattgccgcgaacgatttcggatcgtccggcgcgccccagttcccctgaccatcaaccagcggataacggtaagagaacggctgcgccatcaggaccatcgcttcataacaggcgctatcgccgtgcggatggtatttacccagtacgtcaccgacggtacgggccgattttnnnnnnntggcgctggcattcaggcccagttcagacatcgcatacacaatgcggcgctgaacaggtttcagaccatcaccaataaacggcaacgcacggtccatgatcacgtacatggagtagtttaagtaggcgttttccgtaaattcatgtagcgcaaggcgctctgccatatcgctcattaattctgattcctcaacttattcgccagccttcaaaggggcaatattgccggagatactacattatctgccgcgtcgagtcacaggagatcagcgtgaatagcgccgccggacgtgctccgacggcgataaaggcatcaatgtgccttgatatacaactctttgctgtagacataatcctggggattatgcagcggaaaaccgccaacgtagggtttaagcagtttgattaacggctgatagtagataggaatcagcggtgcctgctggttgacgatcacttctgcctgctgatacaacgcattacgctttgtcgcatcagtgatctgcatggcctggtttagtaaggcgtcatactgcgcatttttccagtgaccgacgttttcttcactatcgcttttgagcgtgttcaggaagctggaagcatcattgtacgtcgcatcccacgactgccgagacagcatgaaatcaccggctcgtcgggcatcaagataggttttccactccattgtgcgcagcgtcacctgtgcacccagccattttttccattcggaagacaacgctatcgcggtcttttcatgcagatcgtacttgttgtagaacagctcaaagcgtagcggatgagaggcgtcgtatcccgcctgtttcagcaaggcttttgccatcgcgacgcgctcactcattggcttttgcagttcatcgaacgtcgtcgcgctaaagccttttacctctggcggcgtcagcgtggttgcgggcgttctcaaccccagtaccttttgcgcaataagctgtcgatcaaccgtaagatatagcgcccgacgcactcgcacatcgttaaatggcggtttctcaaggttgaagttgtaatattcgctgttcagacgcggaataattcgtatctcgccaggcagtgatttttcaatggcgggaatttgctgcgccggaacccaggtgagatcgacctctcccgcgcgatagcggttatagccggtgaccgaattatccagcgccagatactcaacctgttgcaatactgtatgttgcgcatcgcggtactttggatttttgcgtgcagtaatcttttcgttaactacccactgatcaagcacaaaggcaccgttgtaaaccatgttctctggcttactccagctatcgccatgtttagcgatgacatgatgaggaaccgggaacagcgtcggccaggcgagcatcgtcgtgaaccaaggaaccggctgctcaagcgtaacttcaagagtacgatcatccgtcgctttgacacccagcgatgtaacatctgctttacccgcaacaatagccgcggcattgttaatgtgcgcctgtgccagatagccagcaaaagggcttgccgttttcgggtcaaccgcgcgctgccagccgaggacaaaatcctctgccgtcagaggctgaccgtcggaccactgcaaaccgctacgcagatggaaaatatagcgcctgccgccgtccagtatctcccagcgttcagcctgagcgggctgcacctggccttcaccgtccatccataccagaccttcaaacagatccagcacaatctgcgcggcagtattctcctccaccttttgcgggtcgagcgtacctgggtcgctatgattgttgtaacgaaagacttgttgcggggcgagctgtgtgttggtgggaacgtcagcagcgtagagaggagccgcacttaccaggctgaccagccataataaatttcgcgtatacatggtattccttaccggagaaattataagcccaacaacaatacgcctgtggcattgttcgctcaaacttatcgcgagtgatttggctcacactccggtaaagattccccatcacgctaacggcacataaacattcgtttccagtcgctgctccgtcaccccttcggcaagattggtgtagtgaaacagaatcggtgctttacgcattttctcgccgcttgcaggcagccagtggcgaataatgccccatatcgtgtgtgaaatatcgtccagctcgccaacgtggcgagccacggcataacgtccaccggtaagttcaccattgctcacaccataacgattatcgggaatcggttcgctaacgctgccgcagatatcaaagcgaaacgcttccggtgcggtggtggcagggtcgtcccaggcgacgccaaaagtctggctttggttaacaggagaaagccccgtctctttacgccacatgataaatttcgccacgctgtagttgagcaactcaggcctacagcggtgcggcaacatcgccacagggattgatgggaaatcgataatgtttacatccagtgtcaggtttgtcatgttgcctccctgcgaaattattcccgggaacgcatcccgggagcggtaacaattacggatttactttgcggatctgtttgacgtcaatttcaacagaattccagtctttatcgacttcaccctgaatctcaaccgtatctttcggcgtcaccgtcacgccgttccagcgtttgtggtcgatatcaacattgatagtaccgctggcatctttgaacacgtagagatcgtcagagatgcgttcaacgatattgccgcgcagggttacccaggtgtcgtcacgcagggattttgcgctttctacagtcgttacgctgccgttcggcccctggaatcctccggcctgactttgcgttgccgatgggccagaaaaaccgccctgntctgctgccatcaccggtgcgctgcacagggccattactgcgattactgctgcgaattttttcatgtttattactccctttaatgtctgtttccgagcatttaacaagatagtccttaacaacttcttaagggaaaaaaataaaatttagtgctgtacagagcgcgttacaacacggtttactagcagcaaatacggttatcgcagggatgaaaaaatgcgaattttactgatagaagatgacatgctgattggcgacggcatcaaaacgggccttagtaaaatgggttttagcgtcgactggtttacacaaggtcgtcagggaaaagaggcgctttatagcgcaccttatgatgcggtgatcctggatttaaccttaccaggcatggatggtcgcgatattttgcgcgaatggcgagaaaaaggtcagcgtgagccggtactgatcctgaccgcgcgcgacgcgctggaggaacgtgtanaagggctgcgtctgggagctgacgattatctgtgtaaaccttttgcgttgatagaagtcgccgccaggctggaagctctgatgcgccgaaccaacggccaggccagcaacgagctgcgccacggtaacgtcatgctcgaccccggcaaacgtatcgccacgctggctggcgaacccttaacactgaaaccaaaagaatttgccctgctggaattactgatgcgtaacgctggtcgggtactgccgcgcaaactgattgaagagaaactgtatacctgggacgaagaggtcaccagtaatgccgttgaagtgcatgtgcatcatctgcgacgcaaactcggtagtgattttattcgtaccgtgcatggtattggctacacattaggtgagaaatgaaatttacccaacgtcttagtctgcgtgtcaggctgacgctaatctttttaattctggcctcggtgacctggctgctttccagctttgtcgcctggaaacaaacaacggataacgtcgatgaattgttcgacacccaactgatgctgtttgccaagcggttaagtacgctcgatctcaacgaaatcaacgcggcggatcgcatggcacagacgccaaataaattaaaacacggtcatgttgatgacgatgcgctgacctttgccatctttacccacgacggcagaatggtccttaacgatggcgataacggagaagatattccctatagctatcaacgggaaggttttgctgacgggcaactggtgggcgataaagatcaatggcgttttgtctggatgacctcacctgatggcaaatatcgcatcgttgttggtcaggaatgggaataccgtgaagacatggcgctggcgattgttgccgggcaattgatcccgtggttggtcgcactgccggttatgttaatcatcatgatggtactactgggtcgtgaactcgcgccgctgaacaaactggcgctggcactacgtatgcgtgaccctgactcggaaaaaccactaaacgcgactggcgtacccagcgaagtgcgaccactggttgagtcgctaaatcaactgttcgcccgcacacatgcgatgatggttcgtgaacgacgctttacctccgacgcagctcacgaacttcgtagcccgttaacggcgctgaaagtgcaaaccgaagttgcgcagctctctgacgatgatccgcaggcgcggaaaaaagcactgctccaattacattccgggatcgatcgcgctactcgtctggttgatcaactgctcacgctatcgcggctggactcactggataaccttcaggacgtcgcggagatcccgcttgaagatctcctgcaatcgtcggtgatggatatttaccacacggcgcagcaggcgaaaattgacgtgcgactgacactcaatgtccagggcatcaaacgcaccggacaaccgctattgctaagtttgttggtgcgaaatttgctggataacgccgtgcgttacagtccacagggcagcgtggtggacgtcacgctgaatgccgataatttcatcgtaagggataacggccccggtgtgacaccagaggcactggcgcgaattggcgaacgcttctatcgcccacccggacaaaccgctaccggcagtggacttgggctatcgattgtccagcgaatcgccaagctgcatggcatgaatgttgagtttgggaatgcggaacaaggtggatttgaggcgaaggtaagctggtaagggtaagacttttgctaaattcgcaaaagactttgcacattttgctaatttcaccgtaccgctctgtgacgtactatagtcggcaaacgtctcaccttgaggttaaaaaatgagcaacatcctgattatcaacggcgcgaaaaaattcgcccactccaatggtcaactgaacgacaccctgaccgaagtcgcggatggcacactgcgcgacctcgggcatgatgttcgcatcgttcgcgccgacagcgactacgatgtcaaagcggaagtacaaaactttctctgggctgatgtggtgatctggcagatgccaggctggtggatgggcgcgccgtggacagtgaaaaaatacattgatgatgtattcaccgaaggtcacgggactctgtatgccagcgatggtcgtacccgcaaagatccgtcgaaaaaatacggttccggcggcctggtacagggcaaaaaatatatgctttctctgacctggaacgcgccaatggaagccttcaccgaaaaagatcagttcttccacggcgttggcgttgacggtgtgtatctgccgttccataaagcaaaccaattcctcggtatggaaccgctgccgacatttatcgctaatgacgtgataaaaatgcctgatgttccccgctatactgaagaatatcgcaagcatcttgtggaaatttttggttaactagagctcaggctttagaaggagttaaccatgcttaccgtaatcgcagaaatccgtactcgtcctggtcaacatcaccgtcaggcggtattggatcagtttgctaaaatcgttccaaccgtactgaaagaagaaggttgccacggctatgcgccaatggtggattgcgctgctggcgtgagtttccagtctatggcaccggattctatcgtgatgattgagcagtgggaaagcatcgcgcatcttgaagcgcatctgcaaaccccgcacatgaaggcgtatagcgaagccgtaaaaggtgacgtgctggagatgaatattcgtattctgcagccagggatttaacattcctgaaaagaggccggtgttgctaccggcctcaggtcagattagccattctttcttcccgttttcagcccccgatggaaatcgttaattcgcttaatggttttaaccgcacgctgcggcaccgcggaagccaccgaccagacaatcatttccaggcacaacaataccgtaccatgtagtggcgttttccccttttcatccccgcgcggaacatgaatcacgatactggcgtctttgctaaaacgtgaatccagcgcgtttgtcagcaaaataacagggatccccagccgtctcgcttcacgcagcgttgtcagcccttcccggtgcgcagatttttgcgccatcatgatcagaacatcgccacgttgaagcgcaatcagttgctcggcaaggccaatacccgtacggtttagtgccgtggcaggcaaacctatgcggttgaatagtcgtgcggtatagtccgccagaatacccgaagcgccaatgccaaaaattgcgacttgccgtgcctgtaccaacaacgctaccgcttgcgnnagcgcgtggcggttttcaggctctgacaggacattacaggtatacaaatgcccttcaagaacaaagtcgattgcggtgttaacatcgctcgtcaagttactcaccgtcgtagacatcttttcgctggaactaagggctggaccaagccactgttccagagtgcgtttcagatcacgcagcccggcaaaccccagggcntgtatagccctgataactgtggcatcggaagtgttcaacgtggccgcaatttccatcgccgtttgatcgagtaccacttcacgatgctcattaatatagctggcgacagctcttaacccaggcgttaactgactcgcgcgagtgcgaaaacgctcaccataaatatcaacccgcgttttgtctttctgaatcatttggcctccggtaaaggtcgccccgcaatttgtgattgtatctgcgcagccatcagccccagagatgcaaaggagttagaaattgcctcttcacgagaaatcagcacataacgcccggaacgacaggcagtcagaaactgacaccatcccggcatgactttttccattgctgccagctcatcctgaggtttaccaccggtgtcaccgcgccaggttgcaaaaacaaaatcggcatccagttcaggtaaacgctccgcgctcacatccattcgcccaccttcaggaatgctctcaatcagcggcggaaagcgaaaaccagcatcgcgtaatacccgccccagcgaatgatagctatgcatcacattaatttttccctgatttgcctgaatcaccgataccgttattttttggctgtccagcgtcgccttcagcgcattgatttgtgcctgatagcggcgttcaagtatcgccagctgcgactgcgttcctgtcagttctgccagcttgcgatagatttctggcgcgccccctttgagatgatcaatgctcaccgtgggcgcaattttttccagttgttcaatgggtgtattacgggtcggttctgtgatgatcaggtcaggctttgccgccacaatcgcttcaatatcaatatcagcggtgccaataaaagcgatcgatgaattatcaaagtcgacacctgtcaataacgcgcctgatcgaatgaaatggctaccgtcaggccgagttcgcccgtggctggcgacaggaggtacaccgagctcaatcagaggaatagtgatatcaagatcgtgtaaagagacaattctctttggatgagcaggaacagtgactttgcgccctaaatcatcagtaaagacctgaacaggttctgtcgcgcgggcaaagaatgacaacagtatcagcagagaaaaaaataaacgcatataactcccattaaaaactgttcctgcgctgccagagcagtagcaaaaagaatggtccaccaatcaatgaaataatgattccggcaggcagttgcaaaggcaaaaaagccaaacgaccaatgctatccgccaggatgactaacaacgcccccgatacggcgctccccagcagtaatgtcgtctgcccgccacgtagaataaaacgtgatatatggggtgctatcaatccgacaaaaccgatgttaccaacacacgaaacgcagacggctgtcaggattattggtgcggcgacacgtaacaacgccagacgagaactattcacccctaacccggttgcaacctgatgaccaagcagagcgatatccgccgtcctggcggtgaacagcaataaaagagcggctggcaacatccaacaggctgaaataccgactaacatccagttagctgcatgcaggcttcccgataaccacatcaatgcagtttgtacatctcgaacatctgcagtggtcataaatacaccgataccggcggcgaaaaaccaggaaacaccaataccaatcagaacaaatcgcgggcgggaaatttcgcgtgcacaaaaaatcacgattaaagccaccaacaagccaccagcaagaccagccantggacgccagaacattcccagcattggaaactggaaaatcagccacagcaccgccacgctacatcnttctttgacgccgattaaaccaggatcggcaaggccgttacgcgcaatggattgcatcgcggcccccgccatacctaacatggctccgcatagcaatgccatgatgactctcggcaagcgaatatcctgcacaatataacgtgcgtctgtgcttacgttttctggagcaaacaacgctcgtcctacttccgatgccgggacaaaaaaagaaccatgcatcagaccgaatatcagtattccaaccgcaaacagaaacagcccaccaagcaacaccagatttttagggcgtaccagtgtcgaaaacttaccaacacgtagtggacgtagcccgacgttcattatccgactcatttgaacattctcgtcgccataatgacaaaaacaggcgcaccaactaacgccgtcatgacaccggtcgctaactcatggggcgtgaaaagcgtccgagcaataatatctgccagtaataacaaaagcgcgccgacacaagctgaaagagggagcagaacgcgcaaatccgctgataccagacgcctgacaatctgcggtactagcagaccgacaaaaccaatggggccagcaatcgatacggctgcgccacagagcaacgcgatcgcaagcagagtgaatgttcgcgtgcggagtaccgagacgcccagcccctgcgccatgcgatcacccagtgccaacatgttaagagagggcgcaaggtaaatggctaacacaaccccccccagagaaaaccaggcggacgtacccagcgtcgcccaatcctgccccgctaaatcacctgctagccatgtccgcatcgccagcagtgtttgttcgtcaagaatcaggattgcagccgttattgaggacacgaacgccgatagcgccacgccgcataaagtaactttcattggcgttagccctgaacgccctgcggaggaaagcagcaatatcaacaggaacaataacgcgccgcccgtagatgccagcagtgggcgtccaaccggaaaggccagcccaagcgcactggcagcaacgacagcaagagcggctccggcatttaagcctaaaatatgtggctcccccaatgggttacgaatgacagcctgcaacaaagcaccagcaactccaagagaagcaccggtaagcaatgctgccgctaaacgcggcaaacggagtcttacaattacgttgtgatcgaagttttgcggttcaaaatgaagaaatgcctgcaacaccgtttgtggtgcaataaatcgggcaccaatccctggatataccacgcatcccacaagcagtaaggcgaggaaaattacagtaaccagccctgtgcgcatcatactttttctacaccacgaaacggcatgaagaacggctttcccgtcagagtatttattgatgcgtgaacatcaacgtcaaagacagcttttaccagctcaggcgtgcaatgctccccctcattcaacacacgcaccactttcccctggcgtaaaaatatcaaagtatcaccataattgacggcaaaattcagatcatgcaacaccacgacgactgtacgcccgtgatgacgcgttaaatcatgtaataactcaagaatttcaacctgataacgtaaatcaagccaggttgtgggttcatccagtaggatataaggcgtnttttgcgccaacaccatcgcaatccagcaacgctggcgctgcccaccagagagtttttcaacaggtaaatgagcaaactcctgcgtaccggttaatttcagggcctcttctaccgcctgctcgtcggcgtcgctccattgacgtatgaaattttgccagggaaaacgcccacgcgacaccagttcataaacggttaagccctccggcaataatggcgactgcggcaagatcccaagtctacgggataacgctttcgttggttgctcgtgaatcgctttaccatccagcaatattgagccgcccatgggttgcaagacacgtgcaatggtgctgagcaacgtcgactttccacagccgtttgccccaaccagaacggtcattttttctgtgggaacggagaaagaaacaccatcaacaatgattttcttgtgatacccggcagaaacattgtcgaggatcagcccctgcccttttgcgttatgtgccacgtgtacgccaacttaatcaaagaaaaacaaaaataaaactcattctcttttgagagtttgacgccacaaaatgtagtagtcaagaagttaaaagccatacaaaaacaaggtaaataacaggtgaaatatttttaaagataaaaataaaatcattaaatattaataaattaccatcaattgaattgcattaacctctcataaaaacacatgtagcaattttttattatttctcatttactactacattactgcatggttgaatgattctcaattacatatccgatggtaaaataacaaacggatagtgcttagtgagcaacaagaaacaattttcactcacgacaatccgtgagtttttgggataacagactaaatggctaagttcacaccttcattctcaggaatcaaaggtcgggcgctcttttcactgctctttgcagcaccaatgattcatgcaaccgacactgcaacgaccaaagatggcgaaacaatcactgttacagcggatgcaaataccgcaactgaggcgaccgatggttatcaacctctgagcacttccacggcgacattaaccgatatgccgatgctggatatcccgcaggtggtcaatacggttagcgatcaggttctggaaaatcagaatgcaacgacgctggatgaagcgctttataacgtcagtaacgtggtacagaccaatacattaggcggaactcaggacgcctttgtacgtcgtggttttggtgctaaccgggatggctccatcatgaccaacggcctgcgaactgtacttcctcgcagtttcaacgccgccacagaacgtgtggaagtgctaaaaggtccggcctccacgctgtatggcattctcgatcctggtggattgattaacgtcgtgaccaagcgcccggaaaaaacattccatggttctgtctcagccacgtcctccagttttggcggaggcactgggcaacttgatatcacaggtcccattgaaggcactcagctggcataccgcctgacgggggaagtgcaggatgaagattactggcgaaacttcggtaaagagcgcagtacatttattgccccgtcactcacctggtttggtgataatgcaacagtaaccatgctctattcccatcgggactataaaactccgttcgatcgtggaacgattttcgaccttacgacgaaacagcccgtaaacgttgatcgaaaaatacgttttgacgaaccgtttaatattacagatggtcagtccgatctggcgcaactcaacgcagaatatcatctcaatagccagtggacagcgcgctttgattacagctacagccaggataaatacagcgacaatcaggctcgcgttaccgcgtatgatgcaacgacaggaacgctgacacggcgtgttgatgcaactcagggatctacccagcgtatgcattctactcgtgcggatctgcaagggaatgttgatattgctgggttctataatgagattctgggtggggtgtcatatgaatattatgatcttctgcgcacagatatgattcgctgtaaaaacgctaaagatttcaatatctacaaccccgtttatggcaataccagcaaatgcacaacggtttcggcgtcggacagtgatcagacgatcaaacaggagagctactcagcttatgcacaggatgcgctctatctgaccgataactggattgccgtcgccgggatccgctatcagtattacacgcagtatgcgggtaaaggccgtccttttaatgtcaatactgacagccgcgatgaacaatggacgcccaaactggggttagtctacaaactgacgccatcggtatccttatttgctaattattcgcaaacatttatgccgcaatcgtcaattgccagctacatcggagatcttccaccggaatcatctaatgcttacgaagtcggggcaaaattcgagctgttcgatggtataaccgcagatattgcgctgtttgatatccataaacgtaacgtgttgtataccgaaagtattggtgatgaaaccatcgccaaaacggcaggccgcgttcgttcaagaggggtagaagtcgaccttgcgggagcattaactgaaaacattaatatcattgccagctacggctataccgatgctaaggttctggaagatcctgattatgcagggaaaccattgccgaatgttcctcgtcataccggttcgntattcctgacctatgacattcataacatgccaggcaataacacactgacgtttggcggtggtggacatggcgtaagccgtcgttcggcaaccaatggggctgactattatctgccaggctatttcgttgccgatgccttcgccgcatacaaaatgaaattgcagtatccggtcacactgcaattaaacgtcaaaaacctgtttgataaaacgtattacacctcttccatcgccacaaataatctggggaatcagattggcgatccgcgtgaagtgcaattcacggtgaaaatggaattttgatcaaaaaagcccggtatacacttgtataccgggctatgttttattcttctggcgggaggattatcagacctcaatctccgccatgtcgcctttctcttgcaaccagttgcggcgatcttccgagcgtttcttcgccagcagcatatccatcatcgcgtcagtacgctgatcgtcttcatcatcgatagtcagctgcaccagacggcgagtgttcggatcaagcgtggtttcgcgcaattgcatcgggttcatttcccccagacctttaaaacgctggacgttcggcttgcctttcttgcgttttaattgctcaagtacgccctctttctcttcttccgtcagcgcgtaataaacctctttcccgagatcaatacggtagagcggtggcagtgcgacgtaaacgtgaccgtgtttcaccaacgcgcggaagtgttttacgaacaaagcgcagagcagtgtagcaatgtgcaaaccatcagagtccgcatccgcgaggatacagattttgccataacgaagctggctcagatcgtcgctgtcaggatcgataccgatcgctaccgaaatatcatgcacttcctgcgaggccagcacttcgtcggaagaaacttcccaggtgttaaggatcttacctttcagcggcatgatcgcctgatattcgcgatcgcgcgcctgcttggcagatccgcctgcggagtcaccttccacgaggaacagttcggtacggttaaggtcctgcgcggtacaatcagccagtttgccaggcagcgccgggccgctggtcagctttttacgcaccacttttttagccgcacgcatacgacgctgggcgctggaaatcgccatctctgccagcaactccgccgcctgaacgttctggttcagccacaggatgaaggcatctttcaccacgcccgaaacgaatgccgcacactgacgcgaagagagacgctctttggtctgcccggcaaactgtggatcctgcatttttactgacagcacataggcgcagcgatcccagatatcttccgccgacaactttacaccgcgcggcaaaatgttgcggtattcacagaactcacgcatcgcgtccagcaggccctgacgcaggccattaacatgggtaccgccctgcatcgttgggatcaggttgacgtagctttcggtcagcagttcaccgccttccggcagccacagtagcgcccagtccaccgcttcagtatcgccagcgaaattaccgataaacggtttttctggcagcgtcggtaaaccgtttaccgcttccgccaggtaatcattcagaccgtcctgatagcaccagcgctgttcggtgttgttgatctcatctttaaaggtaatctcaacgccggggcacagtactgctttggctttcagcacatgcgtcaggcgtgaaacagaaaaacgcgggctatcgaagaaggtttcatccggccagaaatggacgctggtgccggtattgcgtttaccgcaattgccgacaacctgtaaatcctgcaccttttcgccattttcaaaggcgatgttataaacctgaccatcgcggcgcacgttaanttctacgcgcttcgacagggcgttaaccaccgaaatccccacgccatgcaggccgccagagaactggtaatttttgttagagaatttaccgcctgcatgcagacggcaaagaatcagttcaaccgccggtacaccctcttccgggtgaatatccaccggcatcccgcgcccatcgtcaataacttctaacgactggtcagcatgtaaaataacgtccacgcgttttgcgtgacccgccagtgcttcatccacactgttatcaatgacttcttgccccaaatggttagggcgagtggtatcggtatacatccccggacggcggcgaaccggctcaagcccggtgagtacctcaatggcatcagcgttataagtttgcgtcatggtttaagttagcaattcgagttgatcgtcagagatggtgcagaccaagaaaatcgacgatcgggttgaaataatcttcgaagcccgtgaatgcgtggttgccgccttctatgacagtctggcggcaggaagcgtagtacgncaccgcctggcggtaatccagcacttcatctcccgtctgttgcagcagccagatcaaatccggcgcttccagcgggtcaatctgcatgactttaagatcgtaaatatggcgtgactctagcacatattgctgcccggtgtaggggttctcgttctgaccgagatagtccgtcagcagttcaaacgggcgcaccgccgggtttaccaccactgcgggcagcataaaacattgtgacaaccaggtggcgtaatatccccccagtgacgaaccgacaatacccagcgaatcgccgccatgttccaggacaatggattccagcagctctgccgcgtcggaaggatacggcggcaactgcggaatgatcatctcaacgtcagggtgatgttccgccagccagttttttaacaagctcgctttnnnngagcgcggcgagctgttgaaaccgtgtaaataaagaagcgtagacatcagtagccttctgaagcggtatcaggttggaaacgtgtgtccgccaggcgatgcacctcggtggtcagcgtgccatcagcatgtaactcgagagtacgccagccgggcgcgatagtatccagcgtaaagttggaacagtgcggcttaaactgcacacaggtcgacggcgttgccagcaggcggcgaccgttccagtcgagatccagctcctgatgaatatgaccgcacagcaagtatttgacgtgcggaaacttcgccagcacggtatccagttcgcccgcgttacgcaggctgtgttgatcaagccaactacaacccgcaggtagcggatgatgatgcagcagcagcaacgtatggcgctctggcgcatcagccagtttacgttccagccactcaagctgaaactcgcttagctcaccgtgcggcacgccaaacacctggctatccagcaacaggatttgccattgctcaccaataaacacccgcttcgccggggagatacccgcatcctgtaacgcgctgtacatcgcgggctggaaatcgtggttgcccggcagccagacgcagggcgcacgaaaacttgcgatgccttcagcgaaatgctgataggccgcagaggattgatcctgcgctaaatcacctgtcgcgacaatcaggtcgaattcgtgctggtgtggacgaatcgcctccagcaccgcctggtagctttcccaggtgtttacccctaagagggcttcgtgcttttgtgcaaacaggtgagtatcggtaatttgtaaaatcctgactctggcctcaccagccagaggaagggttaacaggctttccaaatggtgtccttaggtttcacgacgctaataaaccggaatcgccatcgctccatgtgctaaacagtatcgcaaccagtccgctaaaaactggttaatttgatgcttttcgtcgcgttgatgcaactttttattaggataatcataccgcgctttgaagcgaaaaatctgctggcttgaacacacttcagccaccatcgcgtcatgatacagacgcaccgtcattgacggaaggctccagtaactgatcgcgggcgcagtctgttctattgtcaccagggtagtgtatcgggtcgattccacaatcgtcagccgatattgtgcgtttgccacctgatagcttacagtttcgccgggtgcgtcattgcgcggtaacaaacggcgcaattgtgaaaagttcatctcgcacaggcgcatcatttcaggaaagtcaggtgtgtaacgcttcatttatgcccactcattttttaacgcttgatgatgcagctgcagccattgcaaagcgatgaccgacgctgcgttgtcgattttcccctcttctacccactggtatgcctgttcccggcttaccacatgaacgcgaatatcttcgttttcatcagccagaccgtgaataccgcttgcggtcgtggcgtccacttcgcccaccataattgacgaacgctcactggtgccccccgggcttgccaggaaacttaacaccggtttggtccgtttgactatcagccccgcctcttcaatcgcttcgcgacgggcaacatcttccacactttcaccctcttcaatcattccggcaaccatctccagtagccaaggggtttcgctagtgtcgtatgcggcaattcgaatctgctcaatcagcacaacttcatcacgcactgggtcaaagggtagcaagactgcggcgtgaccgcgctcaaaaatttcccgccgtacctcatgactcatttgcccgttgaatagacgatgacgaaatctataaagatctaatgaaaaaaagccgcgataaagtgtttctcgtgcaataatttctacatcgtttttgccaaatgtaacgggcaggttgtctggcttaagcattgttaatgtcctggcactaatagtgaattaaatgtgaatttcagcgacgtttgactgccgtttgagcagtcatgtgttaaattgaggcacattaacgccctatggcacgtaacgccaaccttttgcggtagcggcttctgctagaatccgcaataattttacagtttgatcgcgctaaatactgcttcaccacaaggaatgcaaatgaagaaattgctccccattcttatcggcctgagcctttctgggttcagttcgttgagccaggccgagaacctgatgcaagtttatcagcaagcacgccttagtaacccggaattgcgtaagtctgccgccgatcgtgatgctgcctttgaaaaaattaatgaagcgcgcagtccattactgccacagctaggtttaggtgcagattacacctatagcaacggctaccgcgacgcgaacggcatcaactctaacgcgaccagtgcgtccctgcagttaactcaatccatttttgatatgtcgaaatggcgtgcgttaacgctgcaggaaaaagcagcagggattcaggacgtcacgtatcagaccgatcagcaaaccttgatcctcaacaccgcgaccgcttatttcaacgtgttgaatgctattgacgttctttcctatacacaggcgcaaaaagaagcgatctaccgtcaattagatcaaaccacccaacgttttaacgtgggcctggtagcgatcaccgacgtgcagaacgcccgcgcgcagtacgataccgtgctggcgaacgaagtgaccgcacgtaataaccttgataacgcggtagagcagctgcgccagatcaccggtaactactatccggaactggcggcgctgaatgtcgaaaactttaaaaccgacaaaccacagccggttaacgcgctgctgaaagaagccgaaaaacgcaacctgtcgctgttacaggcacgcttgagccaggacctggcgcgcgagcaaattcgccaggcgcaggatggtcacttaccgactctggatttaacggcttctaccgggatttctgacacctcttatagcggttcgaaaacccgtggtgccgctggtacccagtatgacgatagcaatatgggccagaacaaagttggcctgagcttctcgctgccgatttatcagggcggaatggttaactcgcaggtgaaacaggcacagtacaactttgttggtgccagcgagcaactggaaagcgcgcatcgtagcgtcgtgcagaccgtacgttcctctttcaacaacattaatgcttctatcagtagtattaacgcctacaaacaagccgtagtttccgctcaaagctcattagacgcgatggaagcgggctactcggtcggtacgcgtaccattgttgatgtgttggatgcgaccaccacgctgtacaacgccaagcaagagctggcgaatgcgcgttataactacctgattaatcagctgaatattaagtcagccctgggtacgttgaacgagcaggatctgctggcactgaacaatgcgctgagcaaaccggtttccactaatccggaaaacgttgccccgcaaacgccggaacagaatgctattgctgatggttatgcgcctgatagcccggcacccgtcgttcagcaaacatccgcacgcactaccaccagtaacggtcataaccctttccgtaactgatgacgacgacggggcttcggccccgtctgaacgtaaggcaacgtaaagatacgggttatctgccgcattcttcccccttctcgcttcaatttcgaccagccatcctctattctgatgggtatttaccacaggtcccggaagacaaaaatgaaacggacaaaatccatacgccacgcatcgttccgcaaaaactggagcgcacgccatctgacaccagtcgctctcgcggttgccactgtttttatgctggctggctgtgaaaagagtgatgaaacagtgtctctctatcaaaatgctgacgactgttcagctgcaaacccaggcaaaagcgccgaatgtaccaccgcgtacaacaatgcgctgaaagaagccgaacgtactgcgccgaaatacgccacccgtgaagactgtgttgctgaatttggtgaaggtcagtgccagcaggcaccagcccaggctggcatggcaccagaaaaccaggcgcaggcccagcaatccagcgggagtttctggatgccgctgatggccggttacatgatgggtcgtctgatgggcggcggtgcgggatttgcacagcagccgctgttctcctcgaaaaacccagccagcccggcttacggtaaatataccgacgcgacgggtaaaaactatggcgcagcccagccaggccgcaccatgaccgtaccgaagacagccatggcaccaaaaccggcgaccaccactaccgttacccgtggcggttttggtgaatctgttgccaaacaaagcactatgcagcgtagcgcaaccggtacctcttctcgttcaatgggtggctgataccgatggaaagagtcagtattaccgagcgcccggactggcgtgagaaagcccacgaatacggtttcaattttcacaccatgtacggcgagccgtactggtgtgaagatgcttactacaagttgaccctcgcccaggttgaaaagctggaagaagtcaccgccgaactgcaccagatgtgcctgaaagtggtggaaaaagtgatcgccagcgatgagctgatgaccaaattccgcattccaaaacacacctggagttttgtgcgccagtcatggctgacgcaccagccatcgctttattcgcgtcttgatctggcgtgggatggcactggcgaacctaaacttctggaaaataacgccgatacgccaacgtcactatacgaggcggcgttctttcagtggatctggctggaagatcagcttaacgccggtaacttgccggagggcagcgaccagtttaacagtctgcaagaaaaactgatcgatcgcttcgttgagctgcgtgaacagtatggcttccagttgctgcatctcacctgctgtcgcgacacggtggaagatcgcggtaccattcagtatttgcaggactgcgcgacggaagctgaaatcgctaccgagttcctctacattgacgatatcgggttaggtgaaaaaggtcagttcacggatttacaggatcaggtaatttccaacctgttcaagctgtatccgtgggaatttatgttgcgtgagatgttttccaccaagctggaggatgcaggcgtacgctggctggaaccggcgtggaagagcattatctccaacaaggcacttctaccgctactgtgggagatgttcccgaatcacccgaacctgctgcccgcttattttgcggaagnnnntcatccgcaaatggaaaaatatgtggttaaaccgatcttctcccgtgaaggcgcaaacgtgtcgatcattgagaacggcaaaaccattgaagcagcggaaggtccgtatggcgaagaagggatgattgttcagcaattccacccgttaccgaaattcggcgacagctatatgctgattggtagctggctggtgaacgatcaacccgccggaattggcattcgtgaagaccgtgcattgatcacccaggatatgtctcggttttatccacatatttttgttgaataatcaatgatgccggatggcattcgccatccggtaattgttaacctatctgcaccgacagcatacttaaactgcccatttctataccatcgaccggaatggtaattggctcctgcccatcccacgcacctaagacatacagcaacggcagatagtgctctggcgttgggttcgataacgcgccaccttcatggtcgagataattcaccagaggatgctgctctaccggcccttgccacgtcagattcgctttcacatactcattaaacgacatcgcccaaggatacggtgaactatcaccgtgccacttcactgtacgcaggttatgcaccacgttgccgctggcgaccaacattattccttcatcacgcagcgccgcgagttttcgccccatttcgaaatgccaggcggcaggtttgctactgtcgatactcaactgcaccatcgggatatccgcgtcaggatacatcttaatcagcacgccccaggaaccgtggtcaaagccccaggcttctttatccagcgtcaccgggatcggcgctaacagctcaaccagacgctgtgccagcgcaggcgaacccggagcaggataatgcgtatcgtacagcgcctgcgggaagccaccaaagtcatgaatcgtgggcggcgtctccatcgcggtcactcctgttccacgggtaaaccagtgagccgaaactaccacaatcgcttgcgggcgtggcaatgtcatccccaacgtctgccagctgcgggtatacaaattatcttccagcacgttcatcggactaccgtgacctaaaaacaatgctggcatacgtgttgaagacatgatgatatccttaactaaaggtgtcattttgatatcctcacgatacgcttgttcggcggagtaagaacccggataacaatgatgatgatcatcagttattttgacgatctgcctgaaggtgaagatttataaggagttgtcgatgtcagtacctctcattctgaccatactggcgggggcagccacgtttattggcgcgtttctcggcgttctcgggcaaaaaccctcgaaccgcttactggcgttttcgctaggatttgcggcggggatcatgttgctcatctcattaatggaaatgcttcctgccgcactagcagctgaaggaatgtcgcctgtgttgggttatggaatgtttatcttcggtctgcttggctattttggcctggaccgcatgttgccgcatgcgcatccgcaggatttaatgcaaaaatcggtgcagccgttgccaaaatcgatcaagcgcacagccattctgctcactctcggcatcagtctgcataacttcccggaagggattgccacctttgtcacggcgagcagcaacctggagctgggatttggcatcgcactggccgtcgcgttgcacaatattcctgaaggtctggcggttgcaggcccggtttatgcagcaacgggttctaaacgcacggcaattctgtgggcggggatttctggactggcagaaattcttggtggtgtgctggcgtggttaatcctcggtagcatgatttccccggtggtcatggcagcaatcatggcggcggtcgcaggaattatggtggcgctctcggttgatgaattaatgccgctcgccaaagagattgaccctaataataaccccagctatggcgtactatgtggaatgtcagtgatgggattcagtttggtgctgctacaaacggcgggaattggttaaaagcaacatcagaagttgtccagcgcagggacaacttctgctagtttcactaaagccttattctaccttttcggctgtctcttctctcgtactgtttaagtatttgttccgcgcttcaagcagtgcgtctctgtcctggcgaaatgcccgacaataacgtttcaaatgcaggaaataacccaccacaaccagaacaatcaatacaatccagtaccaggcgataaacatccttttacccttaatatttaacaatactaaacatttagcgcataaatttcacatatcctttttcggatatattcatatggtcgcataataacggaacaattatatgattttgatcataatgaaaaagaatgcctgatattaatgaaattttctcatagaaagagaagcggaattaacatcttgcatagtagggaaaaataaaaaccgaagcctgctacaacttcggtttcttgattaaggcagtaaattaagcagcggttttcagctggctttacgctcatgtgcctgacggtatgccaccaggtcttcaatagtcacgagcgccatgttgtgtttattggcaaactcaatgcactctggtgcacgcgccatcgtgccatcgtcattagtcagctcacacagcacaccagccggtttgaagcctgccagcgtcattagatcaatagttgcttcagtatgaccgccacgcgtcagtacaccaccagcctgagcgcggagtgggaaaacgtggcccgggcgattcagatcagaaggttttgcgccatcggcaatcgctgcgcgaacggtcgtaatacggtcagcggcagaaacaccggtagtcacaccttcagccgcttcaatggtcacggtaaaaccggtgccataggcgctggtgttattttctaccatcattggcagatcgagttgtttacggcgatcttcagtaatgcacaggcaaacaataccactaccgtggcgaatggtcagcgccatctgctcaacagtcatggtttctgccgggaagatcatatcaccttcgttttcacggtcttcatcatcaagcaccattacaccgcgtccttcacgcagcgcagccagtgcattttcaacacgttcgaaaggcgtaccaaaagaggaaagtagcgtctgattcatggtaaaaaaacctcactaaaattatggttaccagaatcagggcagtcttaggagtggcggcatatagccaaaataacgtgagcgggtccatgcccgacagaatcgttactctctcccatccggactctaaccgtcggccccggaattacaccggatctgctgtcctttgagttcgcacccaaagcgctcgcgggctttcaactgagttgatttaccgccggtggggaatttcgccccgccctgagaataagcggattcactataacgctaatgattagcggcagcaacgcatagcttcacataattctggtttatgacttacccttatcgcactacaatggcactcaacacctatcagtacagggaaactacaatgattgacccgaaaaaaattgagcaaatcgctcgccaggttcacgaatcaatgcctaaaggaatcagggagttcggggaagatgtggagaaaaaaatccgccaaaccctacaagcgcagctgacgcgtctcgatctggtaagccgcgaagaattcgacgttcagacgcaagtcctgttgcggactcgtgaaaaactggcgttactggagcagcgcatcagtgaactggangcgcgcaataattcggtagcagatcttcaatctcctccggctatcccgcctattgataaagcagaataaagcaacacaaaaacgggccagacggcccgtaatatcagtgttctaattcaagttctctggtttgcatcatctgttggcaataccaggcataacgtgcgcaaaaccaggttctatgttcttcatccatgttaccagtaacggccagaatatcgaccgggcgaccttctgcgtgcattctggcaaaactacgcgccaggaaatcgaaattatttaaagaattaagactatgatccataagcacatcctccggttatcgcataccttttaaggccatatgctttttctgatttcagtattccccaatcagtgtagtgcctttaaacataacgtgcgtaaatatattgtccccgatcacactttttagtgaaaaataaaaaaccatattaaaagactttctcttccagaacttctctaacatgtgttattattaacaaagacaaatgtaagcaaggaaactatcacaaagtaaatattgcgtcactaaatggacattggagtgacatatgattttattcgccgactataacaccccttatcttttcgctatttcctttgtactgttgatcggccttttagaaatttttgcgcttatctgcggtcacatgctctccggtgctcttgatgcacatcttgaccattatgattccataaccacaggtcatattagccaggcacttcattatctcaatatcggaagattgccagctctcgtcgttctttgcttactggctggtttttttggtcttattggcatcctgttgcagcatacctgcatcatggtctggcaatcaccactctcgaacctgtttgtggttcctgtcagtttactatttacgattattgcggtgcattataccggtaaaatagttgcgccctggattccacgcgatcatagctcagctattacagaagaagaatatattggtagcatggcgttaattaccggtcatcaagccacttcaggtaatccctgcgaaggaaaactcaccgatcattttggccaaatacattatttactactggagcctgaagaaggaaaaattttcactaaaggagacaaagtgttaattatttgccgactttctgcaacgcgatatttggcggaaaacaatccctagccccaaatattgtaatttattaatcaaaaggaaatttaataatggatgatattgttaattccgtgccctcctggatgtttaccgcgattattgccgtatgcattctgtttattattggaattattttcgccaggctctatcgtcgcgcttcggcagagcaagcatttgtccgtaccggcttaggggggcaaaaagtggtaatgagcggtggcgcaatcgtgatgccgatctttcatgaaataatccccatcaatatgaatactctgaagctggaagtcagccgctcaaccattgatagcctgattacgaaagatcgtatgcgcgtcgatgtagtagtcgctttctttgtgcgggtaaaaccttcagtagaagggattgccaccgctgcccagacgctggggcaacgcaccctgtcgcctgaagacttacgtatgttggttgaagataaatttgtcgatgccctccgtgcaacagctgcgcaaatgaccatgcatgagttacaggatacccgcgagaacttcgtgcagggagtacaaaataccgtagctgaagatctgtcgaaaaacggcctggaactggaaagcgtttcacttaccaactttaaccagacctcgaaagaacatttcaatcctaacaatgcctttgacgccgaaggtttaaccaaactgactcaggagacggagcgccgtcgccgcgagcgtaacgaagttgaacaggatgtagaagttgcggtgcgtgagaaaaaccgtgatgcactttcgcgcaagttggagattgaacaacaagaagcgtttatgacgcttgagcaggagcagcaggttaaaacccgtaccgctgagcagaatgcgaaaattgcggcttttgaagctgaacgtcgtcgtgaagcagagcagacgcgaattctggctgaacgacagattcaggaaacagaaatcgaccgcgaacaggccgtccgctcaagaaaagttgaagctgaacgtgaagttcgcattaaagagatcgaacagcagcaggtcaccgaaatcgctaaccagacgaaatcgatcgctattgccgccaaatcggaacaacagtcccaggcagaagcgcgtgctaaccttgcactcgcagaagcagtaagcgcccaacaaaacgtagaaaccactcgccagacagccgaagccgatcgtgccaagcaggtggcgctgattgccgcagcacaggatgcagaaaccaaagcggttgaactgaccgtgcgggcgaaagcagaaaaagaagccgcagagatgcaggcggcggcgatcgttgagttagccgaagctacgcgtaaaaaaggcctggcggaagcagaagcacaacgtgcgctgaacgatgctatcaacgtactttctgacgaacaaaccagccttaaattcaaactggccttgttgcaggcgctacctgcggtaatagagaaatccgtggaaccaatgaagtccattgacggtatcaagattattcaggtcgatggtctgaatcgtggtggtactgcgggggatgcaaacacgggtaatgtggggggcggaaacctggcggaacaagcattatcagccgcactctcttaccgcacacaggcaccactgattgactccttgctcaatgaaattggcgtttcaggcggctcactggctgcattgacttcacccttaaccccaacaactcccgtcgccgaaaacgtagaataaattttcagctatgaacatccctggctcaaaaagccggggattttttatatctgnnntccgctaaaaggtgcaaatgatcaggctgttgcagcgttttgcgtgattgctcggggaaggcaaaactgcttcagggaaagcgttgcgcggggtccggcgctcatcaacaatcggggagtaagcaaagggctgaaacgggaaagcccctcccgaggaaggggccttacagaaggaaagggttatgatgaagctcgtcatcatactgattgtgttgttactcgtaagtttcgcagcttattaacagccaatcagaggggggagaaatcctccctcacccttgttcctttactttaggttgaaaaaaaatcagcgtcaagaaggtttcattaacacatatccctggcccaaaaagccggggattttttatatctgcgttccgctaaaaggtgcaaatgctcaggacgttgcagcgttttgcgtgaccgctcggggaaggcaaaactgcttcagggaaagcgttgcgcggggtccggcgctcatcaacaatcggggagtcagcaaggggctgaaacgggaaagccnntcccgaggaaggggccttanagaaggaaagggttatgatgaagctcgtcatcatactggttgtgttgttactgttaagtttcccgacttactaacaactcatcagaggggggagaaatcctcccttacccttgttcctttactctaggttgaaaagacaacagcgtcaataggcctgccatgtacgaagcgagatctgtgaaccgctttccggttagccttttttatcctgttggatcttcttgataatgttagtggtcgagcaaccgtcttcaaagttgagcaccaacacttcgccgccgttggcccagacttctttactcccggcgatctcttccggtttgtagtcaccgcctttcaccagcaggtctggcaggatcccggcgatcagacgctgcggcgtgtcttcttcaaacgacactacccagtcgaccgcttccagtgcgcccagcacaatcatacgctgttcgagtgggtttaccgggcgggaatcccctttcagccgtttggtggaggcatcgctgttgacggcaacaatcaagcggtcacccagcttgcgggcatttgccagataagagacgtgcccggcatgtaggatatcgaagacaccgttggtcattaccactttttcaccacgtttacgcgctgccactacagccagcttcagttcctcttcggtcatcacgccaaagccggtatctgcgcgtccacgtacagcgttttccagctcgatcggcgaaaccgtggacgtccccagtttgccgaccaccacaccagccgccgcattggcaaagaagcaggcttcttccagcgaattacccgctgccagcgttgccgccaggacgccaatcaccgtgtcgcccgcaccggtaacgtcatacacttcctgcgcctgagttggcatatgcagcggcgctttacccggttgcagcagcgacataccctgttcggaacgggtcactaacagagccgagagttcgtaatcggcaatcagtttcatgccgcgctcaacaatctcttcttcggtcttacatttaccgacaacagcttcaaattccgagagattcggcgttaacagcgtagcgccgcggtagcgctcaaaatcggtaccttttggatcaatcagcaccggaacacccgctttacgcgccagttggatcatctgctgtacgcttgccagcgcacctttggcgtagtcagaaagcaccagcgcgccaatcgaactcagcgcctgattaatccgctcgtgcagcggctgcagatcaacaccttcgaaaccttcttcaaaatccagacggatcagctgttggttgcgggaaagtacccgtaatttggtaatggtcggatgcgtcggtacagaaacgaagtcgcatttgacgttgacgtcggccagagatttactcagcgcnngcgctgcatcgtcaatgcccgtcaacccgaccaggcgtgcattagcaccgagagaagcgatattcatcgccacgttagccgcgccgcccggacgttcttcgatggtattcactttaaccacgggcaccggcgcttccggcgagatacgactggtggggccgtaccagtaacgatccagcatcacatcaccaaccaccatcactcctgcacgttcaaactctggcagcgttactttcattcctgtctcctgagagattcaaaatttgcncgcgataataccatacttcattcttccaccagccacttctgccagcttgcccgcaccagttcacgctctgcggtgaagcaatcctccggcacatggcccggcaattcctgtaatgccagatgatgaagttcatcgcgaagcgtagtgtaagcacgggtcagcgccatcgcttcctgctcttccataatgtcgttttgcgccagtagttccagaatgcgcacgttgtctgaccagcgcgttaacttcggtttttcatgagcgtagcgcaacaccagatattgggtaataaattcgatatcggtaattcccccttcatcagctttgatatcaaagcgatcgcgatgtttattgccgagatgagcgcgcattttctcgcgcatttcccgcacttccgtttgcagagttttaccttcacgcggcagcgtcataatctcgcgacgcactgcgtcaaagtgcgcggtgagctgcggatcgccgtacactacacgcgcacgcaccagcgcctgatgctcccacgtccaggcctcgtttttctgataatcggcaaatgcttctgtggaggtaaccagcattcccgccgccccggacgggcgcagccgcgcatccacttcgtacaaaatgccggaagaggttcgcgtgctgaacaggtgcataatgcgttgcgccagacgcagataaaactgtcgtccgtcgatttcccgctcgccgtcagtcatcgcatccattgggcaatcatggaggaagatcaggtcaagatcggaactgtagcctaactcccagccgcccagcttgccgtagccgaccactgcaaaaccacgcccttcgcgttcgttcaggtgattcggcttaccgtagcgggcaaccatttgaacccacgcctgctgaacgacggcatctatcatggcttccgccagccaggttaagtgatcgctcactttcatcaccggtagcgtaccggcgatatccgctgcggcgatgcgtaacagctgcgcctgtttgaactgacgcagcgcctcaagctgttgctcttcgtcatcttccggcacgcgcagcaaatactggcgcaactcatcgcggtaggcatcggtcgccgtcggctggtaaagggtgtttggatcgagcaattcatccagcaataatggataacgcgccagctggctggcaatcatcggcgacgctgcacacagagaaatcaaatgtttaagcgccgcggggaattcactgagcaattctaaataggtggtgcgggtaacaatccccgccagcaaggcggtaatgcgcgacagcgtaacggcagcgtcttcacgcgcacagacatcacttagcagatgcggcatcagatggtcgagcacctgacgcccgcgtggcccgattgtgcgcttatccagctctttgcggaaatcggcaatcagcgtcagcacctgtttgcgatcgtcctcgctaagatgcgccagcactggtgtagtgtcatcttcctgcaacgcatcctgccacagctcgcgccactgttccgacagcgactcttcctgagtttcactttcgtcgtcgccaatcaattcattaaacacccggcgcacattggtcatatgtgcggtcagcgccccggtcaattgcggccagtcagcaaagtccatcgcccacgccagccgcgcacggttaagctcatcagaaggaagcgtctgggtttgttcgtcgttaatgctttgcagcaggttttccagacgccgcaggaacagatacgccactcgcaattgttcagcatcgttttcagaaagcagatgcagcgcggcaatgacgctgagcgttggcagtaaagagcgcgactgcagcgacagttcgcgcccgccgcgaatgagctggaacacctgaacgataaattcaatttcgcgaatgccgcctgcgccgagtttgatattgtcggtcaaaccacgtcgacgcacttcacgggcaatcattcctttcatgttgcgcagcgactgaatcacgctgaaatcgatgtaacgacggaaaacaaacgggcgcagcatcgcacgcaactcgttagcatagacgccttcgctatcgcccataatccgcgccttgaccatcgcgtaacgctcccagtcgcgcccctgctcctggtaataatcttccaacgcggcaaagctcagcaccagcgggccactttcgccaaacggacgcagccgcatatccacgcgatagacgaagccatcctgcgttggttgatccagcactttaatcagccgctgccccatgcgggtaaaaaactgcgcgttatccagttcccggcgtccaccctgcgtacaaccatgttccggccaggcaaaaatcagatcgatatcagaggagaaattcagttccccgccgcccagcttacccatgcctaaaatcagcagcggttgcgcttcgccctgcgcattgcacggcgttccccactcgcggcagcaggcgtcatatagccagtcacgcgccgcaacaatcagcgtctccgccagatagctgagctgctgcaatatgctctcttcagtaaccagtgccagcgtttgcgcccaggcgatacgtaccatgatgcgccgacggaacagccgcagctcgcgcattaacccggcttcgtcactcacattaatgagcgcctcctgcaaccatgcaacgtaatgctgccattcgtcggcctgcggcggttggctttccagttccgtcagccactctggatgcgcacttatgctgtcctgcacaaaatcactgaaagtaagtactgacttcgcctgtgcactaagtgattcctcggctaaaggctctggcagccgctcaacaatggtctgccagtactgctgtaacggtgaagagagcggcttcataagcgattttatccttgcctgattaacgttttccgctgtgcaaccagaacggttcctgattgtttgcctcattacggaaatgttcaatttcgatgcgttgcccggtcgcaatagcgtgatgcagcccctgccagttctccagccaggcttgcgcgacgacaggatcatagtaacccgccagcaacagtattgagtcaatatcacgcgtcaggcgtggcaactggtcacggtagcgntcgcctaacggctggcagaaaacgcttttcagttcagcggcatggcgggaaagatggatatcggcaaagcgtttgaaggagtcgctgattttgccctgcgctttggcatctaaaaatggctgccatgctttgcttaccaaccattcggtcaacgccagcttcgccattgccgtttcggtagagtagaccgccgtcacggcagaaaccgcagaagcaatggtcgcttcgcattgggtcagcaaatcacgtaagtgagtgctcgctttacgcggcacaataccaccgaacagcatcagcgtatgacggaccaagctaatggctgccagcacctgttctttcgccgcatcgttgccgcgtacccacagttcttcatgatactgccattgcgctaacgccagctcgagcgccgcttccagcccctgttccacatcggcttttgccgcaacatgcaaaatggtggtcggtttgatttcacgcgccggattgccctgcgccagatgatagccacgcgccgctttgctcaggctgccctggcgtaatccggtttgcgataccagttggttcgccagtttcagcaccgcgcgcgtgtcgccgctaagcagctccagttccagctcacagataggttcagcaaattcccccgctttcacctcaccctgatcgagagcgatttcaattcggctgccatcgaccgccaccagccatttttcnnnnnaaaaatcggtgctgaacagcggttgtacgcgggaagcgagatcggcgggcaattcgccgttcggccagacttccgtcggtaactgcgccaggtcgagcgtcggttcgctcaacgccacgttatattccgggcgctggtgtaagccgcctgtcactcttcctgcaactttcatggtcatctcatagcgaccgttttcgccacgaatacgtaagcccatatcgtgcccacgcagccagttatccggcgtttcgtagtaaatattcagtaactgcacggggtcatggtgctcgccgcccagcgtattgagatggtcacgcaacgcctcaacggcgctgtgattaacaataaactttaattcgatttcctgagccatggcctttacttatcggttatgtcacataagtgacgatgaacggcgaacttaatgcgatcttttttgtcagtagatagtattttgcgccaaattgccatgcaacgggcaatttgacgggcgtaaaagtttgaagcagtggcaagacctgacacagaggattccgattgatgtcgaatgctttgcgtagcgacactgatgccactactatcgttccactttccatgacaataacgacagcctgatgccaaaattacgcctgatcggattaactttactcgcacttagcgcgactgccgtctcacacgctgaagaaacgcgctatgtttctgacgaactgaatacctgggtccgtagcggtccgggagatcattatcgcntcgtgggcacggttaacgccggcgaggaagtgaccttattacaaactgacgccaacaccaattatgcccaggtgaaagacagctctggccgtaccgcctggatcccgttgaaacaacttagcactgagccaagcctgcgctcccgtgtgccagatctggaaaatcaggtcaaaaccctgaccgataaactcaccaatatcgataacacctggaatcagcgcaccgcagaaatgcagcaaaaagtggcgcagagcgacagcgtgatcaacgggttaaaagaagaaaatcagaaactgaaaaacgagctgattgtcgcgcagaaaaaggtcgatgccgccagcgtgcagctggatgacaaacagcgcaccatcatcatgcaatggtttatgtatggcggcggcgtgctggggcttggcttgctgctcggtctggtactgccgcacctgatcccaagccgcaaacgcaaagatcgctggatgaactaaatcgccttcttcgttgcactgtcttattattaggaattgtgtatttgacgaagggatgatggcgtgaagatttatctggtcggtggtgctgttcgggatgcattgttagggctaccggtcaaagacagagattgggtagtggtcggcagtacgccacaggagatgctcgacgcgggctaccagcaggtaggccgcgattttcctgtgtttctgcatccgcaaacgcatgaagagtatgcgctggcacgtaccgaacggaaatccggctccggttacaccggttttacctgctatgccgcaccggatgtcacgctggaagatgatcttaagcgtcgcgatctgaccattaatgcgctggcccaggacgataacggcgagattatcgacccgtacaacggtctgggcgatctgcaaaatcgtctgttgcgccatgtttcccccgcttttggcgaagatccgttacgcgtactgcgcgtggcgcgttttgctgcgcgttatgcccacctcggttttcgtattgccgatgaaactctgacgctgatgcgcgagatgacccatgcgggtgaactggaacacctgacgcctgaacgggtatggaaagagacagaaaacgccctcaccacccgcaatccacaggtgttcttccaggtactgcgcgattgcnnnnnnntgcgcgttttattcccggaaattgacgccctgtttggtgttccggcccctgccaggtggcatccggaaatcgacacgggtattcataccttaatgacgctctcaatggcggcgatgctgagtccgcaggtcgatgtccgtttcgcaactttatgccacgatctcggtaaaggactgacgccgccagaactctggccgcgtcatcatggtcatggcccggcgggtgttaagttagtggaacaactatgccagcgtctgcgcgtgccaaatgaaattcgcgatttagccagactggtggctgagtttcacgatctcatccacaccttcccaatgctgaacccaaaaaccatcgtcaaattatttgattccatcgatgcctggcgtaaaccgcagcgtgtcgagcaactggcgctgaccagcgaggctgacgtgcgcggcagaaccggttttgaatcagcggactacccgcaaggccgctggttgcgcgaagcctgggaagtggcgcagtcagtgccgacaaaagccgtcgttgaagcgggatttaaaggtgtggagattcgcgaggagctgacccgacggcggattgcggcggtagccagctggaaggaacaacgttgcccaaagcctgagtgagtattgggcattttgccggatgcggcgtaaacgccttatccggctacatgtcaacgacagttgtaggcctgataagacgcgcaagcgtcgcatcaggcgttgattgccggacgcggcgtgaacgccttattcggcctacgcaatcgtggacaacgccaggcatccgacactattcctcaattaaaagaacacgacatacaccgcagccgccacaataaagcgataaatggcgaacgggataaacgaaatgcgcttaatcaattgcaggaaggttttaatcgctatcagcgccaccacaaaagcggtgataaacccaacggcaaacatcgggatatcgccgcttgtcaggaagccccagcttttgtagagatcgagcgccgttgcgcccatcatcatcggcaccgccagcaggaacgaaaactcggaagcagcgtaacggctcacccccatcagcatcccacctgaaatggtcgccccggaacgggagaaacccggccacagcgccagacactggaaacaaccaatcataaacgcctgacgataggtcatatcatcaagacccggcgcacgcggctctttcggcttcaggcattcggcggcaatcagcaacaaaccgccaacgaccagcgcatacatcacatttatcgggttaaacaatgacttaatcgtgtcgtggaacaacagccccagtaccaccgccggaatcatccccagcaaaatgtggatcagcgttaaacgacctttgctttctcnttcgtgctgcaacgggcggccaaagtggatgccaatcaggccaaacagacgccgccagaacatcactactaccgccagaattgatcctaactggatcacaacttcaaaggttttcgccgtgtcgccctcaaaccccaacaagtgaccgacaataatcatatggcccgtgctggataccggcagaaattctgtcaatccttcgaccacacccaatattgccgctatcagcagcgagtgcatatcgctcatcaataaacccctaaattataaaaatgtaacgcttgtccgaactactgcagtatgaccaggttataaccgtttggtttaacagctgtanaattaattattttctttcagattattgccacgctcaatgattacgccaacattcgccgcccgcgccactgcgcctggcttgctgagtttgatacgcacccacggcgagttgaagcgtgctaacagcagctctgccacctcttccgccacgcgctccaccagcgcaaaacgtgccccctcgacgtggctgaccaccgtttctgcaatgtcagcgtagctgaggcaatccgccacattatcgctttttgccgctttacggttatcccacgccatttcgatntcgaacactaatttctgttcgatggtctgttcccagtcgtaaacaccaatagtggtgattaccgaaagttgctctataaatacaatatccatcacgacctgctcgctttttggctaacccggataccacttccggcgaaatgtgcgtattatccacagattcatcgtttaacacgaattttcaaaacggaacagcttatgagtgcaatcgcgcctggaatgatcctcatcgcgtacctctgcggctccatttccagtgccattctggtttgccgcctgtgtgggctgcccgatccgcgaaccagcggctccggtaatcctggcgcaactaacgtgttacgtataggtggcaaaggagcagccgtagcagtactgattttcgacgttctgaaaggaatgttgcccgtctggggcgcgtatgaattaggtgtcagccccttctggctaggcttaattgccatcgccgcctgtcttggacacatctggcccgttttcttcggatttaaaggaggaaaaggcgttgctaccgcttttggtgccatcgcacccattggctgggatctcaccggagtaatggcgggaacctggttactgaccgtgctattgagcggatactcgtcgctgggagcgattgtcagtgcactgattgctccgttttatgtctggtggtttaagccacaattcaccttcccggtttcgatgctctcttgcctgatcctgctgcgtcatcatgacaacatccagcgtctgtggcgtcgtcaggagacaaaaatctggacgaaattcaaaagaaagcgcgaaaaggatcccgagtgatttctggtggttctacatnnnnnnatagccttcatcgggtttgcccagccgttgctggcaccatgccgccagaaattccacgcagacacgtaatttcatgctgcgatagagcggctcccggtaaacagcccagatattggcgctttgtgcatactccggcaatacttgcaccagtttgccactctccagaaacggcaacacatcccactcggaacgcagcataatccctttgccctccagcgcccattgcagcacaatctcgccgctattggaggaaagatgcccgctaaccttcaccgattttttctcctgaccgttccccaactcccatattccgtgggtcatatcgcgctctttggtcaccagacagtcatgacgacttaattcctgtagggattgtggctgcggatatttttgcagatactcaggtgctgcgcataatattcttttatttttcgttaacagatgcgcaatataataatcaggaatttcgtcattaatacgaatatccagannnnnnttatcctgcactaaatcaatttgccgatcgaacaattcaaaatacacctgtaactcaggataattgcgcataagttcggtaatggctggcgcaatatggctgcgcccaaaaccaaaactgcaaccaatacgaatcatcccctccgggcgcgttttgatttgcgtgacgtcatcgaccagtcgctgatattgggtgaggatttccagcgcatgttcgtaacaacgttggccactttcagtcagcgccacgccgcgagcggagcggttcagcagcgttgttgccagcgtattttcaaggatttggatccgcttggtgacaaatgcaggcgtttgcccaagcgtcgccgctgcagcactaaaactcccgctgtggacgatttctaccagtacctgcaagtctttggctaaaggccagctattcagcatcgttaattatccgcagttgtgataagcgcagtgtatttcgcaaaacattgccattccctgctctggcgcaatattcattcttattttcgcgttgattcacgaactgttaattacatattcacggtggcaaaaaatataaaaccacatttttagtggtagtttgtggcggtgaatttttccagacaaatacaaaaactggagttgccatgatgagcgaaagtaataagcaacaggcagtgaataagttgacggagattgtcgctaactttaccgccatgatttctacccgaatgcctgatgacgtggtggataaactaaaacagctaaaggatgccgaaacgtcgtcgatggggaaaattatctaccatacgatgttcgacaacatgcaaaaagcgattgacctgaatcgtcctgcctgtcaggacaccggggagattatgttcttcgttaaagtcggttcccgcttcccactgcttggcgagctgcaaagcatactcaaacaagccgtggaagaggcgaccatcaaagcgccgctgcgtcacaatgcggtagaaatttttgacgaagtaaacaccggcaaaaataccggtagcggcgtaccgtgggtcacctgggatatcgtccccgacggtgacgatgcggaaatcgaagtttacatggcaggcggcggctgcacgctaccaggccgctcgaaagtgttaatgccgtcagaaggctacgaaggcgtggtgaaattcgtcttcgaaaatatctccaccctcgcagtaaacgcctgtccaccggtactggtgggcgtgggcatcgccacctcggtggaaaccgccgccgtactctcgcgtaaagccattttgcgcccgattggcagccgccaccccaatccaaaagcggcagagctggagctacgcctggaagaaggactcaaccgtctggggattggtccacaagggctgactggcaacagttcagtgatgggcgtgcatatcgaatctgccgcccgccatccgtcaaccatcggcgttgctgtttctaccggttgctgggcgcatcgtcgcggcacactgctggttcatgccgatctcacctttgaaaatctgtctcacacccggagcgcgttatgaaaaagatcctgacaaccccgatcaaagctgaagatctgcaagatattcacgtcggcgatgtgatctatctgaccggtacgctggtgacctgccgtgacgtttgtcaccgccgattgatcgaactgaaacgtccgctcccttacgatctcaacggcaaagcgattttccacgctggccccatcgtgcgcaaaaacggcgacaaatgggagatggtctccgtcggtccgacaaccagtatgcgtatggaaagttttgaacgtgaatttatcgagcagaccggcgtgaaactggtggtcggcaaaggcggaatggggccgctgaccgaagaaggctgtcagaaattcaaggcgctacatgtaattttcccggcaggctgcgcggtgctggcggcaacccaggtggaagagattgaagaagtgcactggacagaactcgggatgccggagtcactgtgggtctgccgggtcaaagagttcggcccgctgattgtctctattgatacccacggcaacaacctgatagccgaaaacaaaaagctgttcgccgaacgccgcgatcccatcgtggaagagatctgcgagcacgtccattacatcaaataaccctcccggagaggctcgccccctctcctttttcgcaggcataacacgatgaaaccttccactgaatggtggcgataccttgcgccgctggcggtcatcgccattattgctctaattccggttcccgcagggctggagagtcatacctggctctactttgccgtttttactggcgtaatcgttggactgatcctcgaacccgtgccgggtgccgtggtggcgatggtgggtatctccatcatcgccatactctctccctggctgctgttcagcccggagcagctcgctcagccaggctttaaattcactgcaaaatccctctcgtgggccgtttccggtttttctaattcggttatctggctgattttcgccgcctttatgtttggcacaggctatgaaaaaaccgggctggggcgacgtatcgcgctgattctggtgaaaaagatggggcatcgcacgctgtttcttggctatgcggtgatgttctccgagctgatcctggcacctgtcacaccgtccaactcggcgcgtggtgcggggattatctatcccatcatccgtaacctgccgccgctctatcaatcacaaccaaacgacagcagttcgcgcagtattggctcgtacatcatgtggatggggattgttgccgactgcgtgaccagcgccattttcctgacggcgatggctcctaacttgctgttaattggactgatgaaaagcgcatctcacgccacgctgagttggggcgactggttcctcgggatgttgccgctcagtattttactggtcctgctggttccctggctggcttacgtgctgtacccgcctgtactgaagtcaggcgatcaggtgccgcgctgggcagagacggaactgcaggcaatgggcccgctctgttcgcgtgaaaaacggatgctggggctgatggtaggcgcgctggtgctgtggattttcggcggtgattatatcgatgccgcgatggtcggttacagcgtggtggcgctgatgctgcttctgcgcattatcagttgggacgatattgtcagtaataaagcggcgtggaacgttttcttctggctggcctcgcttatcaccctcgcgaccggactcaacaacaccggttttattagctggtttggcaaactgttagcaggcagcttaagcggttattcgccaacgatggtgatggtggcgttgattgtggtgttttatctactgcgctacttttttgccagcgccacggcgtatacctccgctctcgcaccgatgatgattgccgctgcgctggcgatgccggaaatcccgctgccggtgttctgcctgatggttggtgcggcaattggtctggggagcattcttacaccatacgccaccggccccagtccgatttactacggcagtggttatctgccaacggcggattactggcgactgggggcgatttttgggctgatattcctcgtattgctggtgattaccggcttactgtggatgcccgtggtgttgctttaagtaaggacggtgccggaagtaactctccggcacccgatagttttacgcagccggtaactccgccagcggccagcgcggacgcacgctaacgccgagatccgccgtcgcgcctgctttaaaccgcaccattccggcataggcgatcatcgcgccgttatcagtacaaaattccggacgcgcgtagaacacttcgnnnnggcgttttttcatcatttcagccagcttcgcccgtaacgtgcggttagaactcacgccgcccgccatgaccagtcgcttaaagcccgtctgatccagcgcacgcttacacttaatcatcaacgtatcgaccaccgcatcttcaaaggcgcgggcgatgtcagcacgcgtctggtcgtcggtgccgttgtcacgaatggtatttgccgcgaaggttttcaggccggagaagctgaaatccagccccggacggtcggtcatcggacgcgggaaaacaaagcgcccggcagtaccctgcgccgccattttcgacagtaacggtccgccaggataatccagccccagcagcttcgcggttttatcaaacgcttcaccggcggcatcatcgatagactcgccgagcagctcgtactgaccaatgccagtcacgctgattaactgcgtatgaccgccggaaaccagcagcgcaacaaacggaaattccggcgggttatcttccagcatcggcgctaacagatgcccttccatatggtgtacagggatcgccggaacgttccaggcaaacgccagagaacgccccacggtcgcgccaaccagcagtgcgccgactaatccagggcctgcggtataggccacagcatcaatgtcttttgccgttaaaccagactcctttagcgccgcctggatcaacggtacggttttacgcacatgatcgcgggaggccagttcaggcacaacgcccccgtagtcagcgtgcaatttcacctgactatacaattggttggctaacaaacctttttcatcgtcgtaaatggcgatgccggtttcatcgcaggaagtttcaatacccagtacacgcatgacttgttttacctcgctttattaccgcgcagtgtaggaccaatgcgggttgatgtaaaactttgttcgcccctggagaaagcctcgtgtatactcctcacccttataaaagtccctttcaaaaaaggccgcggtgctttacaaagcagcagcaattgcagtaaaattccgcaccattttgaaataagctggcgttgatgccagcggcaaaccgaattaatcaaaggtgagaggcacatgccggtaattaaagtacgtgaaaacgagccgttcgacgtagctctgcgtcgcttcaagcgttcctgcgaaaaagcaggtgttctggcggaagttcgtcgtcgtgagttctatgaaaaaccgactaccgaacgtaagcgcgctaaagcttctgcagtgaaacgtcacgcgaagaaactggctcgcgaaaacgcacgccgcactcgtctgtactaattccccgagagcgttgctctccgatcagaccgagttgtagttgtaaggccgtgcttccgaaaggaatgcgcggcttattttcgtttatgaattgctaaaaatcggggcctatggctggacgaatcccacgcgtattcattaatgatctgctggcacgcactgacatcgtcgatctgatcgatgcccgtgtgaagctgaaaaagcagggcaagaatttccacgcgtgttgtccattccacaacgagaaaaccccgtccttcaccgttaacggtgagaaacagttttaccactgctttggatgtggcgcgcacggcaacgcgatcgacttcctgatgaactacgacaagcttgagttcgtcgaaacggtcgaagagctggcggcaatgcacaatcttgaagtgccatttgaagcaggtagcggccccagccagatcgagcgccatcagcggcaaacgctttatcagttgatggacggtctgaatacgttttaccaacaatctttacaacaacctgttgccacgtctgcgcgccagtatctggaaaaacgcggattaagccacgaggttatcgctcgctttgcgattggttttgcgcctcccggctgggacaacgtcctgaagcggtttggcggcaatccagaaaatcgccagtcattgattgatgcggggatgttggtcactaacgatcagggacgcagttacgatcgtttccgcgagcgggtgatgttccccattcgcgataaacgcggtcgggtgattggttttggcgggcgtgtgctgggcaacgatacccccaaatacctgaactcgccggaaacagacattttccataaaggccgccagctttacggtctttatgaagcgcagcaggataacgctgaacccaatcgtctgcttgtggtcgaaggctatatggacgtggtggcgctggcgcaatacggcattaattacgccgttgcgtcgttaggtacgtcaaccaccgccgatcacatacaactgttgttccgcgcgaccaacaatgtcatttgctgttatgacggcgaccgtgcaggccgtgatgccgcatggcgagcgctggaaacggcgctgccttacatgacagacggccgtcagctacgctttatgtttttgcctgatggcgaagaccctgacacgctggtacgaaaagaaggtaaagaagcgtttgaagcgcggatggagcaggcgatgccgctttccgcatttctgtttaacagcctgatgccgcaagttgatctgagtacccctgacgggcgcgcacgtttgagtacgctggcactgccattgatatcgcaagtgccgggcgaaacgctgcgaatatatcttcgtcaggaattaggcaacaaattaggcatacttgatgacagccagcttgaacgattaatgccaaaagcggcagagagcggcgtttctcgccctgttccgcagctaaaacgcacgaccatgcgtatacttatagggttgctggtgcaaaatccagaattagcgacgttggtcccgccgcttgagaatctggatgaaaataagctccctggacttggcttattcagagaactggtcaacanttgtctctcccagccaggtctgaccaccgggcaacttttagagcactatcgtggtacaaataatgctgccacccttgaaaaactgtcgatgtgggacgatatagcagataagaatattgctgagcaaaccttcaccgactcantcaaccatatgtttgattcgctgcttgaactgcgccaggaagagttaatcgctcgtgagcgcacgcatggtttaagcaacgaagaacgcctggagctctggacattaaaccaggagctggcgaaaaagtgatttaacggcttaagtgccgaagagcgatcgggaagcccccgacagccgcactgagaggcagcggcaaatatataagtacgccctcgtaattatcgttggcggtaaacaaccgttggatttcagcgttaacggctgaaggacatcgggtcaatcgcccaacaccaacctcatgaaataagtgtggataccgtcttatggagcaaaacccgcagtcacagctgaaacttcttgtcacccgtggtaaggagcaaggctatctgacctatgccgaggtcaatgaccatctgccggaagatatcgtcgattcagatcagatcgaagacatcatccaaatgatcaacgacatgggcattcaggtgatggaagaagcaccggatgccgatgatctgatgctggctgaaaacaccgcggacgaagatgctgccgaagccgccgcgcaggtgctttccagcgtggaatctgaaatcgggcgcacgactgacccggtacgcatgtacatgcgtgaaatgggcaccgttgaactgttgacccgcgaaggcgaaattgacatcgctaagcgtattgaagacgggatcaaccaggttcaatgctccgttgctgaatatccggaagcgatcacctatctgctggaacagtacgatcgtgttgaagcagaagaagcgcgtctgtccgatctgatcaccggctttgttgacccgaacgcagaagaagatctggcacctaccgccactcacgtcggttctgagctttcccaggaagatctggacgatgacgaagatgaagacgaagaagatggcgatgacgacagcgccgatgatgacaacagcatcgacccggaactggctcgcgaaaaatttgcggaactgcgcgctcagtacgttgtaacgcgtgacaccatcaaagcgaaaggtcgcagtcacgctgccgctcaggaagagatcctgaaactgtctgaagtattcaaacagttccgcctggtgccgaagcagtttgactacctggtcaacagtatgcgcgtcatgatggaccgcgttcgtacgcaagaacgtctgatcatgaagctctgcgttgagcagtgcaaaatgccgaagaaaaacttcattactctgtttaccggcaacgaaaccagcgatacctggttcaacgcggcaattgcgatgaacaagccgtggtcggaaaaactgcacgatgtctctgaagaagtgcatcgcgccctgcagaaactgcagcagattgaagaagaaaccggcctgaccatcgagcaggttaaagatatcaaccgtcgtatgtccatcggtgaagcgaaagcccgccgtgcgaagaaagagatggttgaagcgaacttacgtctggttatttctatcgccaagaaatacaccaaccgtggcttgcagttccttgacctgattcaggaaggcaacatcggtctgatgaaagcggttgataaattcgaataccgccgtggttacaagttctccacctacgcaacctggtggatccgtcaggcgatcacccgctctatcgcggatcaggcgcgcaccatccgtattccggtgcatatgattgagactatcaacaaactcaaccgtatttctcgccagatgctgcaagagatgggccgtgaaccgacgccggaagaactggctgaacgtatgctgatgccggaagacaagatccgcaaagtgctgaagatcgccaaagagccaatctccatggaaacgccgatcggtgatgatgaagattcgcatctgggggatttcatcgaggataccaccctcgagctgccgctggattctgcgaccaccgaaagcctgcgtgcggcaacacacgacgtgctggctggcctgaccgcgcgtgaagcgaaagttctgcgtatgcgtttcggtatcgatatgaacaccgatcacacgctggaagaagtgggtaaacagttcgacgttacccgtgaacgtatccgtcagatcgaagcgaaggcgctgcgcaaactgcgtcacccgagccgttctgaagtgctgcgtagcttcctggacgattaatcggtaggccggatcaggcgttacgccgcacccggcacctgtccctttgcacaaacgccaccttttcggtggcgttttttatcgcccacgcaccaccagcgcctggtccagctcgcgatacgcttcaaccagtttctccagtgaaacgcgacttaaaccgctgggatttggcagcacccaaatctgcgtcgaaccaatgctgagcgtttgtttcccccacagtgcaccacgctggctgaatccctgttcatatgcttgtttgcccagaatcgccaacgcttgcggctgataatcttcaattttttcaatcagcttacgcccacctgcgtgtagctcttgctttgaaatttcattggcttgcaccgttggcctgtctaccagtttggtgacgccacaacgataatccagcagatgctgtgcctcctgcggcttcaactgacggtcggtaaacccggcctgatatatcaccttccagaagcgatttgccggatgagcaaagggaaaaccagtcccggcggatgaaagcccagggttgataccgcaaaacacgacccgtaaccctggagccaaaatatcctcaaccatatttactcctttctaacatcaccaggaaaagtataacggattgaaaatacattgtttataaaaacagcaggcgcgcggtaatggctggattgcgacacggagttactttataatccgctaccatggccccttagctcagtggttagagcaggcgactcataatcgcttggtcgctggttcaagtccagcaggggccaccagatatagcaaaggctgacgagaaatcgtcagcctttttctttttatatatcagttactttgcgtgccagtangccgctgcacgtacccgctgtgggtcatactgttccgcttcaaagcggcggcttaaattcttaacgactttaccttcgccggttatccagatgaagtaatcatcggcagggatttgcatctgcgccagacgcgcatctaccgcctgctcatcatgtgccagccattcgatattaaaaccatcaaggtgcgcgagataatcctgacaggcgttatcccgcacgctaaccagcgcactaacttgcggtttaacggcaagtttgctcaacgtttccaggcggcggcgcaatgcgggcattccggattcatcgcagacatacagctgatacgcgtaatcttccggcaccaccagcgaaccgcgcggacctgccaccgtaagtttatcgcccggttgcgcctgcatcgcccagccgctggcgaccccaccgtcgtgaataaagaaatcgatcgccagttcatggcgtagttcgtcatacagcggcgtatagtcacgcgacggtgggcgtggtccttccggccagacgatgccctcttccgttaccgttggcggcacaaagtgagcgtcaggttgaggaaagaagagtttgctgtgatcgtcaaagccgcgcgatgtaaaaccgtccagcgcctcgccgccaaggacaatgcgctgaaaaccggcgctgatacgctcaacgcgtagcacagtcaattcacggaagcgcagatcattgcgaacgcgctgcgggtagcggggggagttattcattgttatcgccttcgtgatggtaatcagatatatctaaataattttcgcaaatgataatgattgttaatcatgataaatgcaagcgatttgtagaactgatatgtctatagtctgacaagacgaaccgcntcttctcaggcatcattantcaacgccggatgcggcgtgaacgccttatccggcctacgtgtgagatgagtccacatttaaaaatcatnnttattcttgcaagagtgctcacatcagatataaattagatatatcnnattaagcaaaaggaggctgatatgagccatcatcacgaagggtgttgtaaacatgaaggccagccacgccatgagggctgctgcaaaggtgagaagtcagaacacgagcactgcggacacggtcaccagcatgaacacggtcaatgttgcggtggtcgccacggtcgcggcggcggtcgtcggcaacgtttctttggtcacggtgaattgcgtctggtgattctggatattctctcgcgcgatgacagccacggttacgaattgattaaagcgattgagaatctaacccaagggaattacaccccaagcccgggcgtcatctacccgacgctggattttctgcaggagcagtcgctgattaccatccgcgaagaggaaggtggtaagaagcagattgcgctgaccgaacaaggcgcgcagtggctggaagaaaaccgcgaacaggtggagatgattgaagaacgcatcaaagcgcgttgcgttggcgctgcgctgcgccagaacccgcaaatgaagcgggcgctagataattttaaagcggtgctggatttacgcgtcaaccagagtgatatcactgatgcacaaataaaaaagatcattgcggtgatcgaccgcgccgcttttgatattacgcaactggattaatcgccgcatccgccagtggcgcggtgcaattgccggatgcgacgcttgacgcaccttatccggcctacacccgctacacaccccgtaggcctgataagatgcgccagcatcgcatcaggcatcgtgtatcaaataccggatccggcataccgattaatgcagcaccgtcaccgcgtcttccagtcggctggcgcggtgtttcaccatcgccgacacctgcgcactctcttccaccagctcggcatttttctgggtgatgaggttaagctcatccactgcacgggtcaggctggaaagaccatcggcctgttccagcgttgaatggctaatctgggcaatcaactgggtgacgtttttcacctgtgccacaatatcttccatcgtacgtccggcggcgtgtacctgctgcgaaccggattgcaccttatcagcactggcatcaatcagcttgcgaatatcgttggcagcattggcgctgcggctggctaaatgacgcacttcccccgccaccaccgcaaaacctttgccctgttcgccggcacgcgccgcttccaccgccgcattcagggccagaatattggtctgaaacgcaatatcgttaatcagcgaagtaatggtgccaatgcgctgggtactgtcggcgatatcgtccattgtcttgatcaccgtggtcatcgcctccccgccctgcactgccgcattactggcggtgattgacagtttatcggcagccgacgccgtggcagagttctgtttcaccgacgccgccatttggttcatggtcgccaccgtttgctgaacgttatcaactgtctgctgggtatgttcgttcagttcatcggtgcctttcgccagcgtctcactgccgtttctgacactggacacctggcttgagacatcgttaattaaccaacggcacatcaggccaagctgccctaccgcgcgtaatgtcagccccagctcatcgctgcgattcagatgctcaacactattacgctctccggtcgccaccttcagtgcctgacgggcgacattttctatcgggcggacaatctgccattcaaaacaggcgcttgccaacaataccactaacgcacagaggatatacgtcaccaccggggcagcaacaaaccaaagcatggccgccagcaagataaacatcagggtcatcactccacgcgcccgccagcgaagcggtaatgaaggcagtttacccagccagcctttacgcaccaccaggcctttatgaatacgcttaccggtacgtccggcgttcagcgctttgtacagcggctccaccgccgcgatctcttcatccgtcgcccgggtacgaatcgacatatagccactgatttttccctcgcgcaccatcggtaccgcattggcccgcacccaataatggtcaccatttttgcggcgatttttcacgatgccgctccagggctccccttttttcagggtgaaccacatatccgcaaacgccgcttttggcatatccgggtgacgcaccatgttgtgcggctgcccttgtaactcttgcaaggtaaagccgctcacctgcacaaaagtgtcattagcatgagtgatatagctttgcagatcggtagtggacatcagagtggtatcgtccgccagcggggtattttgctgggtgacatacggatgagaagacatgttcgcgtcctgtgcaggttatatggttgttaacttcttgtcagagtttatgtcggccccgctgcggttatctttaaccgattaatttgatttagatcgcaatttgcgattaaagcacaaatctaattcgttgatttaaaatactttcactctgttactatacgaaaacgttaattatcttgcccaaaaatcaggcagttaatgccctgaaagcgtgcatttgcgcagcaattatcaaatccatacccgacaaaaaccgtgcaaaataacaacagatgttaacaaatagcattaaatattgcgcaaatgataaccacatttgtgtttatcccgattttcgcgatcgcagccggagtggcgcaatccctgcaatacttaaatcggtatcatgtgatacgcgagcctccggagcatattttgaacaggttaccttcgagcgcatcggctttagcgtgcagcgcccacgccctgaatctcattgaaaagcgaacgctggatcatgaggagatgaaagcacttaaccgagaggtcattgaatacttcaaagagcatgtcaatccggggtttttagagtatcgcaaatctgttaccgccggcggggattacggagccgtagagtggcaagcgggaggtttaaatacgcttgtcgacacccagggacaggagtttatcgactgcctgggaggttttggaattttcaacgtggggcaccgtaatccagttgtggtttccgccgtacagaatcaacttgcgaaacaaccactgcacagccaggagctactcgatccgttacgggctatgctggcgaaaacccttgctgcgctaacgccaggtaaactgaaatacagcttcttctgtaatagcggcaccgagtccgttgaagcggcgctgaagctggcgaaggcttatcagtcgccgcgnngcaaatttacttttattgccaccagcggcgcgttccacggtaaatcacttggcgcgctgtcggccacggcgaaatcgaccttccgcaaaccgtttatgccactgctgccagggttccgtcatgtgccgtttggcaatatcgaagccatgcgcacggctcttaatgagtgcaaaaaaaccggtgatgatgtggccgcggtgatcctcgaaccgattcagggcgaaggtggcgtaattctgccgccgccgggctatctcaccgccgtgcgtaagctgtgcgatgagttcggcgcactgatgatcctcgatgaagtacaaacgggcatggggcgcacgggcaagatgttcgcctgcgaacatgagaacgtacagccggacatcctgtgcctggcaaaagccctcggcggcggtgtgatgccgattggcgcaaccatcgccactgaagaggtgttctcagttctgttcgacaacccgttcctgcataccaccacctttggcggcaacccgctggcctgtgcggcggcgctggcgaccatcaatgtgttgctggagcagaacttaccggctcaggctgagcaaaaaggcgatatgttgctggacggtntccgtcaactggcgcgggaatatcccgatctggtacaggaagcgcgtggtaaagggatgttaatggcgattgagtttgttgataacgaaatcggctataactttgccagcgagatgttccgccagcgcgtactggtggccggaacgctcaataacgccaaaacgatccgcattgaaccgccactgacactgaccattgaacagtgtgaactcgtgatcaaagcggcgcgtaaggcgctggcggccatgcgagtaagtgtcgaagaagcgtagtatcaaatcggatggcaatacgacgtcgccatccgatctttttatacgatacgtacgcccgcaggcatcatccgctccggcgttaacagcacgctttcactgccgtcatcggtttccgcacacaacagcatgcattccgacgtttcaccacgcattttcgctttttgcagattgcataagaccaccaccgtttttcccatcaactcttcttcgctgtagtacggcaccaggctggtcacggtttgcagtgttttttcccccacatcaacctgtacgatgtacagcttgtcggcgttttcatggcgtttcacttccacaatctttccgacgcgcatttccagacgtgcaaaatcagcgtaagccacggtttccattgcttcctcccttcgagtaaaattttactaaactatagcaaaagtttttctcaatcctgtaggctaaaaatggagaatgcaggcgtgatcacattcgtgagccgctgtgttaccgttacagcgtcaaagaaacgcgctttatttactgaaaacaggtgacccgataagcacttcctctacaatgggggcgcacatcagggaaagtaaaaaaggtaaacatggcaacactaaaagacatcgcaatcgaagctggcgtatccctggcgacagtatccagggtcttaaatgacgatccgacattgaatgtgaaagaagagacgaaacatcgcattctcgagatcgccgaaaagctggagtacaagaccagtagcgcccgtaaactacagacaggcgcagtcaaccaacaccatattctggctatctacagctaccagcaggagctggagatcaacgatccttactatctggcgatccgccacggcattgaaactcagtgcgaaaagctggcgatcgaactgaccaactgttatgaacacagcggattaccagacattaaaaacgtcaccggtattttaattgtcggcaaacccacgcccgccctgcgcgccgctgccagcgcgttgaccgacaatatctgttttatcgactttcacgaacccggcagcggttacgatgcggtggatatcgatctggcacgcatcagtaaagaaatcatcgacttctatatcaaccagggcgttaatcgtattggttttattggcggtgaagatgagcctggcaaggcggatattcgtgaggtcgcctttgcggaatatggccgactgaaacaagtggtacgcgaagaggatatctggcgcggcggtttttccagttcgtcgggttatgaactggcaaaacaaatgctggcgcgggaagactatccgaaggcactgtttgttgcttccgattccattgctatcggcgtactgcgggcgattcatgaacgtggtctgaacatcccacaggatatttcgcttatcagcgttaacgatatccccaccgcgcgatttacctttccgccgctctccaccgtgcgcatccattccgaaatgatgggaagtcagggcgtaaacctggtgtatgaaaaagcccgcgatggtcgcgcgctgccgctnttagtcttcgttcccagcaaannnnaactgcgcggcacgacccgttaaatccccttacacactgtccggcaatcgtttttgccgggcagtgctgccgtttattttcgtgatccagttaaagtaaatgcatttacccgctactttttagtannnnnnttactaaactccccagcaattacacaaactaccatcaccatgaatggttccgatttctctctaccgggaggccctatgaatcgctgggaaaacattcagctcacccacgaaaaccgacttgcgccgcgtgcgtactttttttcatatgattctgttgcgcaagcgcgtacctttgcccgcgaaacgagcagcctgtttctgcccttaagcggtcagtggaatttccacttttttgaccatccgctgcaagtgccagaagccttcacntctgagttaatggctgactgggggcatattaccgtccccgccatgtggcaaatggaaggtcacggcaaactgcaatataccgacgaaggttttccgttccccatcgatgtgccgtttgttcccagcgataacccaaccggtgcctatcaacgtattttcaccctcagtgacggctggcagggtaaacagacgctgattaaatttgacggcgtcgaaacctattttgaagtctacgttaacggtcagtatgtgggtttcagcaagggcagtcgcctgaccgcagagtttgacatcagcgcgatggttaaaaccggcgacaacctgttgtgtgtgcgcgtgatgcagtgggcggactctacctacgtggaagaccaggatatgtggtggtcagcggggatcttccgcgatgtttatctggtcggaaaacacctaacgcatattaacgatttcactgtgcgtaccgactttgacgaagcctattgcgatgccacgctttcctgcgaagtggtgctggaaaatctcgccgcctcccctgtcgtcacgacgctggaatataccctgtttgatggcgaacgcgtggtgcacagcagcgccattgatcatttggcaattgaaaaactgaccagcgccagctttgcttttactgtcgaacagccgcagcaatggtcagcagaatccccttatctttaccatctggtcatgacgctgaaagacgccaacggcaacgttctggaagtggtgccacaacgcgttggcttccgtgatatcaaagtgcgcgacggtctgttctggatcaataaccgttatgtgatgctgcacggcgtcaaccgtcacgacaacgatcatcgcaaaggccgcgccgttggaatggatcgcgtcgagaaagatctccagttgatgaagcggcacaacatcaactccgtgcgtaccgctcactacccgaacgatccgcgtttttacgaactgtgtgatatctacggcctgtttgtgatggcggaaaccgacgtcgaatcgcacggctttgctaatgtcggcgatatcagccgtattaccgacgatccgcagtgggaaaaagtctacgtcgagcgcattgttcgccatattcacgcgcagaaaaaccatccgtcgatcatcatctggtcgctgggcaatgaatccggctatggctgtaacatccgcgcgatgtaccacgcagcgaaggcgctggatgacacgcgattggtgcattacgaagaagatcgcgatgctgaagtggtcgatattatttccaccatgtacacccgcgtgccgctgatgaatgagtttggtgaatacccgcatccgaagccgcgcatcatctgtgaatatgctcatgcgatggggaacggaccgggcgggctgacggagtaccagaacgtcttctataagcacgattgtattcagggacattatgtttgggagtggtgcgaccacgggatccaggcgcaggatgacaacggcaatgtctggtataaattcggcggcgactacggcgactatcccaacaactataacttctgtcttgatggtttgatctattccgatcagacgccgggaccaggcctgaaagagtacaaacaggttatcgcgccggtaaaaatcnnnncgctggatctgactcgcggcgagctgaaagtcgaaaataaactgtggtttaccacgctggatgactacaccctgcacgcagaggtgcgcgccgaaggtgaaacgctcgcgacgcaacagattaaactgcgcgacgttgcgccgaacagcgaagcccccttgcagatcacgctgccgcagctggacgcccgcgaagcgttcctcaacattacggtgaccaaagattcccgcacccgctacagcgaagccgggcattctatcgccacttatcagttcccgctgaaggaaaacaccgcgcagcctgtacctttcgcaccgaataacgcccgtccgctgacgctggaagacgatcgtttgagctgtactgttcgcggctacaactttgcgatcaccttctcaaaaacgagtggtaaaccgacatcctggcaggtaaatggcgaatcgctgctgacccgcgagccaaagatcaacttcttcaagccaatgatcgacaaccacaagcaggagtacgaagggttgtggcagccgaatcatttgcagatcatgcaggaacatctgcgcgactttgccgtagaacagagcgatggtgaagtgttgatcatcagccgcacggttatagcaccgccggtgtttgacttcgggatgcgctgtacctacatctggcgcatcgctgcagatggccaggttaacgtggcgctttccggcgagcgttacggcgactatccgcacatcattccgtgcatcggtttcaccatggggattaacggcgaatacgatcaggtggcgtattacggtcgtggaccgggcgaaaactacgccgacagccagcaggctaacatcatcgatatctggcgcagcaccgtcgatgccatgttcgagaactatccnttcccgcagaacaacggcaaccgtcagcatgtccgctggacggcactgactaaccgccacggcaacggtctgctggtggttccgcagcgcccaattaacttcagcgcctggcactatacccaggaaaacatccacgctgcccagcactgtaacgagctgcagcgcagtgatgacatcaccctgaatctcgaccaccagctgcttggcctcggctccaattcctggggcagcgaggtgctggactcctggcgcgtctggttccgtgacttcagctacggctttacgttgctgccggtttctggcggagaagctaccgcgcaaagcctggcgtcgtatgagttcggcgcagggttcttttccacaaatttgcacagcgagaataagcaatgaggatcatcgataacttagaacagttccgccagatttacgcctctggtaagaagtggcaacgctgcgttgaagcgattgaaaatatcgacaacattcagcctggcgtcgcccactccatcggtgactcattgacttaccgcgtggagacagactccgngaccgatgcgctatttaccgggcatcgacgctattttgaagtgcattactacctgcaagggcagcaaaaaattgaatatgcgccgaaagagacattacaggtcgtggaatattatcgtgatgaaactgaccgtgaatatttaaaaggctgcggagaaaccgttgaggtccacgaagggcaaatcgttatttgcgatatccatgaagcatatcggtttatctgcaataacgcggtcaaaaaagtagttctcaaagtcaccatcgaagatggttatttccataacaaataacaactacggcggcaaaaggagtttgccgccaccgctaccctactcattttcggagatgtgttatgtctgataccaaacgtaatacaatcggcaaattcggcttgctctcgctgacttttgccgccgtttacagctttaacaacgttatcaataataatattgagcttggactggcctcggcaccgatgtttttcctcgcgacgattttttattttattcccttctgtctgatcatcgcagaatttgtttcgttaaataaaaactcagaagccggtgtctacgcgtgggtaaaaagttcgctgggcggacgttgggcatttattactgcctatacctactggttcgtaaacctgttctttttcacctcgctgttgccgcgcgttattgcttatgcttcgtatgccttcctcggctatgaatatattatgacgccggttgccaccaccattatcagtatggtgctgttcgccttctccacctgggtttccaccaacggggcgaaaatgttggggccaattacctccgtcacttcaacgctgatgctgctgttaacgctctcctacattttactggcaggtacggcgctggttggcggcgtacagcctgctgaccccatcaccgttgacgcgatgatcccgaacttcaactgggcgttcctcggcgttaccacctggatctttatggccgcaggtggcgcggagtccgtcgctgtgtacgttaacgacgtcaaaggcggttcgaaatcgttcgttaaagtgatcatcctcgccgggatttttatcggtgtactatattccgtctcctcggtgctgattaacgtcttcgtcagcagcaaagagttgaaatttactggcggatcggtgcaggtattccacggcatggcggcgtattttggtctgccggaagcgttgatgaatcgctttgtcggtctggtgtcctttaccgcaatgttcggttccctgctgatgtggaccgcaacgccggtgaaaattttcttctccgaaatcccggaaggcatctttggtaagaaaaccgtcgaacttaacgaaaacggcgttccggcgcgcgcagcgtggatccagttcctgatcgtcatcccgctgatgattatcccgatgctcggttccaatactgtgcaggatctgatgaatactattattaatatgaccgccgcagcgtccatgcttccgccgttattcatcatgctggcttacctgaatttacgcgccaaattagatcacctgccacgcgatttccgtatgggctcccgccgcaccggtattatcgttgtttcaatgctgattgcgatatttgccgtagggtttgtcgcttcgacattcccgactggcgcgaatattctgaccatcattttttataacgtcggcggtattgttatattccttggctttgcgtggtggaaatacagtaaatatataaagggattaacggctgaagagcgccatattgaagcgacgccagccagcaatgttgattaaacagantaataaaaaatgagcaggcattttccntcttcctggatgaggagagggaaaatagtttctgcctttatatttttataattacaacgataaaaggctgtactttttctttagctcatggattaacacaatgaaattaatcactgcaccatgcagagcattacttgctctgccgttttgctacgccttttctgcggcaggagaagaagcacgtccggcagaacatgacgacacaaaaacacccgcaattacctcgacatcttctccttcatttcgtttttacggcgaattaggggttggtggatatatggatttagagggtgagaataaacataaatacagcgacggcacctatattgaaggtggcctggagatgaagtacggctcctggttcggcctgatttacggcgaaggctggaccgtgcaggccgaccacgacggcaatgcctgggtgcctgaccatagctggggcggtttcgaaggtgggattaaccgtttctatggcggttatcgaaccaatgatggcaccgaaatcatgctcagtctgcgtcaggattcctcgctggatgacctgcaatggtggggcgacttcacacccgatctgggctacgtcattcccaatacccgcgacattatgaccgcgctgaaggtgcagaacttaagcggcaactttcgttatagcgtcaccgccacacctgccggacatcatgacgaaagcaaagcatggctacattttggcaagtacgatcgctacgacgacaaatacacctatccggcaatgatgaacggttacatccagtatgaccttgccgaaggcatcacctggatgaatggtctggaaattaccgacggcacaggacaactctatctcacgggactgcttacccctaactttgccgctcgcgcctggcaccataccggacgtgccgacgggctggacgtaccgggaagtgaaagcgggatgatggtgagcgccatgtatgaagcgttaaagggcgtttatctctccaccgcttacacctacgccaaacatcgccctgaccacgctgacgatgaaaccacctctttcatgcagtttggtatctggtacgaatatggcggcggacgtttcgcaacggcttttgatagccgcttctacatgaaaaatgcctctaacgatcccagcgaccaaatcttcctgatgcaatatttctactggtaataaggactgtaatttcatgaaaatcaaaactattttaacgccagtaacctgcgctctgctgataagtttttccgcccatgccactaacgccgacaattataaaaacgtgattaaccgtactggtgcgccgcagtacatgaaggattacgattacgacgatcaccagcgttttaatccgtttttcgatctcggagcctggcatggtcatctgttgccagacggcccgaacaccatgggcggctttccgggcgttgcgctgctgacggaagaatacatcaactttatggccagcaatttcgaccgcctgaccgtctggcaggacggcaagaaagtcaacttcacgctggaggcatacaatattcccggcgcgctggtgcaaaaactgacagcaaaagatgtgcaggtcgaaatgactctgcgcttcgccacgccgcgcacgtcactactggaaactaaaatcatcagcaataaaccgctggatctggtgtgggatggcgaactgctggaaaaactggaagcgaaagaagggaaaccgctttccgataaaaccattgctggcgaataccctgactaccagcgcaaaatcagcgccacccgtgatggcctgaaagtcacctttggcaaagtgcgcgccacctgggatctgctgacctccggtgaatcagaatatcaggtgcataaatccctgccggtgcagactgaaatcaacggcaatcgctttaccagtaagtcgcatatcaacggttcgacgacgctctataccacctattcccatctgctgacctctcaggaagttagcaaagagcaaatgcagatccgcgatattctggcgcgtccggcgttttatctcaccgcctcgcagcaacgctgggaagagtatctgaagaaagggttaaccaatccggatgcgacgccggaacagacacgcgtcgcggtgaaagcgatcgaaacgctcaacggtaactggcgctcgcctgggggtgcggtgaaatataacaccgtcacgccgtcggtgaccgggcgctggttctccggcaatcagacctggccgtgggatacctggaagcaggcgtttgcgatggcgcatttcaatccggacatcgccaaagagaatatccgcgcggtcttctcctggcagatccagcctggcgacagcgtgcgtccgcaggatgtgggctttgtccccgacctgatagcgtggaatcttagccccgagcgtggtggcgatggtggcaactggaacgaacgaaataccaaacccagccttgccgcctggtcggtgatggaagtgtacaacgtcacccaggataaaacctgggtggcagagatgtacccgaaactggtggcctatcacgactggtggttacgtaaccgcgatcacaacggcaacggcgtgccggaatatggcgcgacccgcgacaaagcccacaacactgagagcggcgagatgctgtttacggtgaagaaaggcaacaaagaagagacgcagtctgggctgaacaactacgcccgcgtggtggagaaaggccagtacgacagtctggaaattccggcacaggttgctgcatcgtgggaatcggggcgtgatgatgccgccgtctttgggtttatcgacaaagaacagctggataaatatgtcgcaagcggcggcaaacgtagcgactggacggtgaaattcgccgaaaaccgcagtcaggacggaacgttgctggggtactcgctattgcaggagtcggtggatcaggccagctatatgtacagcgataaccattatctggcggagatggcgacgattctcggtaaaccggaagaggctaagcgctatcgccagttggcacagcagctcgcggactacatcaacacctgtatgttcgacccggctacgcagtacttctatgacgtgcgtattgaagataaaccgctggcgaacggctgcgcgggcaaaccgattgttgagcgcggtaaagggccggaaggctggtcgccgctgtttaacggtgcggcaacgcaggccaatgccgacgcggtggtgaaggtgatgctcgatcctaaagagttcaatacctttgttccgctgggaacggcggcgttaaccaatccggcctttggcgctgatatctactggcgcgggcgcgtatgggtggatcagttctggtttggtctgaaagggatggagcgttacggttatcgcgatgatgccctgaaactggcggatacgttcttccggcacgccaaagggttaaccgccgatggcccaattcaggaaaattacaacccgctgacaggcgcacagcaaggcgcaccaaatttctcctggagtgccgcacatttgtatatgttgtataacgattttttccgtaagcaataatttgcaacggctggcggatgcngcgtgaacgccttatccgccctacatnttcgttcccgtaggctggataagacgcgacaagcgtngcatccggcatctgcacctcgccacnggcggatgcngcgtgaacgccttatccgccctacatgttcgttcccgtaggctggataagacncgacaagcgtcgcatccggcntctgcaccncgccactggcggatgcggcgtgaacgccttatccgccctacatgtgcaatcccccaggtcggatagggcccggcaagcgtcgcatccggcgttaccaccgggcgtattctttttgaatcccatcacaaaccccgcactccccttttcccttttctccggcgacggctaaattagaactcatccgaccacataacaattattttacatactggacaattttatgagctacccgtcgctgttcgccccgctggatttaggttttaccacgttaaaaaaccgcgtgttgatgggttcaatgcacaccgggctggaggaatacccggacggtgctgaacggctggcagcgttttatgccgaacgcgcccgtcacggcgtggcgctgattgttagcggcggcattgcaccagatttaacaggcgttggcatggaaggcggcgcaatgctcaatgacgccagccagatcccacaccatcgcaccattaccgaagcggtacatcaggaaggcggcaaaatagccctnnnnnnnttgcataccgggcgctacagctaccaaccgcatctggtcgcaccgtccgcattgcaggcccccatcaaccgtttcgttcctcatgaactcacccatgaagagatcctgcaactgatcgacgatttcgcccgctgcgcgcaactggcacgggaggcaggatacgacggtgtagaggtaatgggttccgaagggtatttgatcaacgaatttctgacgctgcgcaccaatcagcgcagtgaccagtggggcggcgattaccacaaccggatgcggtttgccgttgaagtggtgagtgcggtacgcgaacgcgttggcaacgacttcattattatctaccgactgtcgatgctcgacctggtcgaaggcggcgggacttttgccgaaacggtagagctggcgcaggccattgaagnnncgggcgcgaccattatcaacaccggcattggctggcatgaagcgcgtattccgaccatcgccacgcccgtgccacgcggcgcatttagctgggtcacgcgcaaactgaaaggtcacgtctcgctgccgctggtgaccaccaaccggattaacgatccgcaggttgccgacgatattctctcgcgcggcgatgccgatatggtatcgatggcgcgaccgtttcttgcggatgcggaactgctgtcaaaagcgcaatcagggcgagccgatgagatcaacacctgcattggctgcaaccaggcgtgtctcgatcagatcttcgttggcaaggtcacctcgtgtctggtgaatcctcgcgcctgccatgaaaccaaaatgccgatccttcncgccatgcagaaaaaaaatctggcggtggtcggtgcgggacctgctgggctggcgtttgccattaacgcggcggcgcgtggtcatcaggtaacgttgtttgacgcgcacagtgagatcggcgggcagtttaatatcgccaaacagatccccggcaaagaggagttttacgaaacgctgcgctattaccgccggatgatcgaagtgacgggcgtgacgctaaaactcaatcacaccgtgacggcggatcagttacaggcgttcgatgaaacgatcctcgccagtgggatcgtgccgcgcactccgcccatcgacgggatcgatcatccgaaggtattgagttatctcgatgtactgcgcgacaaagcgccggtgggcaacaaagttgccatcatcggttgtggcgggattggttttgatacggcgatgtatttaagtcagccgggcgaatccaccagccagaatatcgccgggttctgtaatgaatgggggatcgacagcagcctacaacaggctggtggcttaagcccgcagggaatgcagatcccgcgtagcccacggcagattgtgatgctccagcgcaaagccagcaaaccgggacaggggttaggcaaaaccaccggctggatccatcgcaccaccctgctctcgcggggtgtgaaaatgatcccaggcgtaagttatcagaagattgacgatgacgggctgcatgtggtgatcaacggcgaaacgcaggtattagcagtggacaatgtggtgatctgcgcagggcaagagccaaaccgcgcattgnngcagncgctgattgatagcgggaaaacggtgcatttaattggcggctgcgatgtggctatggagctggacgcacgacgggcaattgcccagggaacacggctggcgctggagatttaaatcgtgcattgaagtgccggatgcaacgcatccggcacgtcgcgttaatcaataaacaaggcgggagaaatgccgaatcgcgttgccaattttttagcgtgttccagcgttaatttcctcttcccgctcaaaacgcgtgacaccatagatttactgccaatttccggcagatcggaaagggttaaaccatattgatccataagggtacgaatcacggctataccgccaggcatggcttgagccatggcattaaattccncaaattcgggcgctgattcttcccacgcggttattttggcacacaccagatccagtaaggggttttcaggatcgttgagcagcagatgatctaccagttccagcgcctggatgtattgttcctcgttctgaatacccgccagaaaaggtgccacagcagttagcttttctcctgcatgcaagatgtcggcaatcgcaatcattttttccccttagtacgatgaacagcggtaaaaaaatcgtattctttatgcgtcataacttcacgtatgtagcacttttgcgattcaaaaaagaccattgctacaacacgtaattcattgcccccaacattgaaaacataatgcttatccagatatttgaagttatccagagatgggaatactgcttttaatgactcaggttttttgaaatatcccttagcaatcgtgttccctagagccaccaactccgttttatgttgcgggtatttttccgcagcatctttcaatgctttttgagttatcaggtgcattcttcatcacgtccgttgacaaattggcaatatgataacatccgttgacagattggcaacggatgaatttatctgtgtgacggaagaataaacgttaaacaacgctaaacaagagaatgtagaggatggtgacagggattttttgttttatggagcgcgattccagaactgggcagacattgccggatgcgacgcttgccgcatcttatccgacctgggggtaatgtgctaaacgtatgccagataaggcgtttacgccttatctggcaggtagctgtcaatcttaccgacgacgccccagcttcactgctttcagcaccacaaatttattattcgtggcgatggtggtgcagttgccaaaaattttcttcagtttatggaagtaatccaggtgacggttggcaacgatatacagctcgccgttgattttcaggcagcggcgggcgtggtggaacatctcccaggcgacgttatcggtcagcgcatgttgctgatgaaacggcgggttgcagagcacagcattaaagcggaaaggctccacgccggagagcgcgttgttgatcataaattcgcagcgatccaacgcctctggcatgttggtttcaacgttcaaacggctggaagcaaccgccatcggcgattcatcgacaaacaccactttcgcctgcgggtttttatcaagcagcgtcagaccaataacgccattaccgcaaccgagatcgacaatctccccttcgagattctctggcagatgttgcataaagaagcnnnnnncgatatccagcccggtgcgggagaagacattcgcatggttgtggatagtccagtcagtaccttccagcttccagctaacggtctgcggcgcatcggccagcggtggttcattgaaagtgcagttaatcaggcgcgctttcttccatgccagcgtggtggtggtcgggccgagcactttttcgaatagttccagcgtggaagtgtggatgtcacgggctttggcaccggcaataatacgtgtttgtggcgtgaccactttgcncagcgcacgcagttgctgttccagcaatgccagtgttttcggcactttgatcagcaccacacccggctgttgcgggtagtcggcggtgctgtcgagaaacttcacgctcgactcatcaatcccgttgaggcgtaaattctcgcgcgtcgccagttcactgatgtatgagtcgccaatgctgtacggcttatgttccgccagcgcgcagcttaacgcaccaaaggnatcattcaggatcaacaccgggccgcggatttctgtgttgtccaactgttgcagcaaatattcatccgccgcttcccacgcctgtagcgggttaacgtcatccgtcgccggaaaacgttgtagtgtcagtgaacggaaaccgttgtctaagtggctcatcggccctcctgaatgataaaatttcgacattgcccctgaaaagggtgcgtgagtataccctttttctctttttcgtgggcggttatgagcaatcttacttatcttcagggttatcccgagcagctactttcccaggtgcgaacactgattaacgaacagcgtctgggcgatgtgctggcaaaacgctatccgggaacacacgactacgccaccgataaagccctctggcaatatactcaggatctgaaaaatcagtttctgcgtaatgccccgccgatcaataaagtgatgtatgacaataagatccatgtgctaaaaaacgcgctcgggttacataccgctgtttctcgtgtgcagggcggcaagctgaaagcaaaagcagagatccgcgtcgctaccgtgtttcgcaacgcgccggaaccgtttttgcgcatgatcgtggtgcacgagctggcgcacctgaaggagaaagagcataacaaagcgttttaccagttgtgctgtcatatggaaccccagtaccaccagcttgagttcgacacccgactgtggctaacccagttgtcgcttgggcaggacaaaatctgaaaatgatgtcaggcgttatcttttctttctttagcgcctaaaatcgacctcccccctttcgttaaggataacgaccatgctgcgcgcatttgcccgccttcttctccgtatttgtttttctcgccggactctaaagattgcctgcttactgttacttgtggcaggagcgaccatttttatcgccgatcgcgtaatggtcaacgccagcaaacagctgacctggagcgacgtcaacgtcgttccggcgcgtaacgtgggcttattgctgggggccaggccgggtaatcgctactttacccgacgtattgataccgcagcagagttgtaccacgccggaaaagtgaaatggctgctggtcagtggcgataacggacgtaaaaattacgatgaagcgtcaggcatgcagcaggctttgatcgcaaagggcgtaccggcaaaagtgatcttctgtgactatgccggattctcaacgcttgattcagtggtgcgtgccaataaagtgtttggggagaaccatatcaccattatctcgcaggaatttcataaccaacgcgccatctggctggcaaaacaatacggcatcgatgctatcgggtttaacgcaccagacctggaaaaaggacgcggaaagattgtccgtctgcgagagaaactcgccagagtcagcgcggtgattgacgcgaaaatcttccatcgtcagccaaaatatctcgggccgtcggtcattattggtccgtttagtgagcatggttgtccggcgcagaaataatgcgtatccgcgcacgtcgaagatgaaaaaggcgtgctacattgacgacagaatccctttattgagtatccacgcgttatgatacgtttcgccgtgattggtacgaactggataactcgccagttcgtggaggccgcacatgaaagcggtaaatataagttaaccgccgtttattcccgcagccttgaacaggcccagcacttcgccaatgagttttctgtcgagcatctgtttacttcgctggaagcaatggcggaaagtgacgctatcgacgcggtgtatattgccagcccgaacgccctgcatttttcccagacgcaacttttcctgagccacaaaattcatgtgatttgtgagaaaccactggcgtcgaatctggcggaagtggatgcagccattgcctgcgcgcgtgaaaatcaggtggtgctgtttgaggcatttaaaacggccagcctgcctaactttcatctgttacgccaggcgctgccgaaagtcggcaaactgcggaaagtttttttcaactattgccagtattcctcgcggtatcaacgttacctggacggtgagaatcccaacacctttaatccggcattctctaacggttcaattatggatatcggcttttactgcctggcgtcggcggtagcgttatttggtgagccgaaaagcgtgcaggcaaccgccagtttantggcaagtggtgtagatgcccacggcgtggtggtgatggattacggtgatttcagcgtcaccttgcagcactcaaaggtcagcgattctgtcctggcaagcgagattcagggcgaagcgggatcgctggtgattgaaaaactgtctgaatgccagaaagtgtgcttcgtgccgcgtggcagccagatgcaggatctcacccagccgcagcatattaataccatgctctacgaagcagagctgttcgctaccctggtggatgagcatctggtggatcatccagggctggcggtcagtcgcatcacagccaaactgctgaccgagatccgccgccagactggggtgatttttccggcagatagcgtaaaactataattgccaaagtaaaacagtgtaaaaggtatgtaacagaccattgactgactgaatggtctgtcatactttgttacctgcaaaggggagtaacttcattgccggtcgatcgtcattacgatgtgtgaaaaaccacatccggtcaccgggcaacccgaaaggaatacgcagacgtattccttttttgttgtaagtgagaccttgccggaaggcgaggtctatgcataaaaagcagcggctgacgtcttccgacgttggccgttttttttatgtgtaaggaacttctatgaatactgtcggcacgccgttgctatggggcggattcgctgttgttgtcgccattatgctggctatcgacctgttgttgcagggacgtcgtggggcacatgccatgaccatgaaacaggctgcggcctggtcgctggtctgggtgacgctgtcgttactgtttaacgctgctttctggtggtatctggtacaaaccgaaggtcgcgccgttgccgatccacaggcgctggccttcctcacgggttatctgattgagaagtcgctggcggtcgataacgtctttgtctggctgatgttgttcagctatttctccgttccggcggcattacaacgccgcgtgctggtgtatggcgtgctcggggcgattgttctgcgtaccatcatgatcttcactggcagctggctgatttcgcagttcgactggatcctgtatatcttcggtgccttcctgctgtttaccggcgtgaagatggcgctcgcccatgaagatgaatcaggcattggcgacaagccgctggtgcgctggctacgcggtcatttgcgcatgaccgacaccatcgacaacgagcatttctttgtgcgtaagaatggattgctgtacgccacaccgctgatgctggtactgattctggtggaattgagcgacgtgatttttgccgtggatagcattccggctatcttcgccgtgaccactgacccgttcattgtgctgacctcaaacctgtttgcgatcctcggcctgcgtgcgatgtatttcctgctggcgggcgtagcagagcgtttctcgatgctcaaatatggcctggcggtgattctggtgtttatcggtatcaagatgctgattgtcgacttctaccatattccaatcgccgtctcgctgggcgtggtgtttggcatcctggtgatgacgtttattatcaacgcctgggtgaattatcggcatgataagcagcgggttggatgatttttaatctgcctaagccgtgtaccctgtcatcaacatgagcaccgttttctccctctcccttccagggagagggtcggggtgagggtaatttttcgcaccgatgctggcctgttcccctcaccctaaccctctccccaaacggggcgaggggactgaccgagtccttttttgacgtagtcctcagtctggaagccgcacgttggctttatttttatgtcaaataaatgtaaccattaagttgcaaaatatgacctctctttaaaatccagcatttttcgcttcccgaagctgtaactttccttatactcgaccttgcaaacactttgttacatcctgaaagatgcgtcgacagaacgcaccagggatgtgcgacaacacaatgaaaggatcgaaaaatgactacgcaacgttcaccggggctattccggcgtctggctcatggcagcctggtaaaacaaatcctggtcggccttgttctggggattcttctggcatggatctcaaaacccgcggcggaagctgttggtctgttaggtactttgttcgtcggcgcactgaaagccgttgcccccatcctggtgttgatgctggtgatggcatctattgctaaccaccagcacgggcagaaaaccaatatccgccctattttgttcctctatctgctgggtaccttctctgctgctctggccgcagtcgttttcagcttcgccttcccttctaccctgcacttatccagtagcgcgggtgatatttcgccaccgtcaggcattgtagaagtgatgcgcgggctggtaatgagcatggtttccaaccccatcgacgcgctgctgaaaggtaactacatcgggatcctggtgtgggcaattggcctcggtttcgcactgcgtcacggtaacgagaccaccaaaaacctggtcaacgatatgtcgaatgccgtcacctttatggtgaaactggtcattcgcttcgcaccgattggtatttttggtctggtttcttctaccctggcaaccaccggtttctccacactgtggggctacgcgcaactgctggtcgtgctggttggctgtatgttactggtggcgctggtggttaacccattgctggtgtggtggaaaattcgtcgtaacccgttcccgctggtgctgctgtgcctgcgcgaaagcggcgtgtatgccttcttcacccgcagctctgcggcgaacattccggtgaatatggcactgtgtgaaaagctgaatctggatcgcgatacctattccgtttctattccgctgggagccaccatcaatatggcgggcgcagcaatcaccattaccgtgttgacgctggctgcggttaatacgctgggtattccggtcgatctgcccacagcgctgctgttgagcgtagtggcttctctgtgtgcctgtggcgcatccggcgtggcggggggttctttgctgctgatcccactggcctgtaatatgttcggtatttcgaacgatatcgccatgcaggtggttgccgtcggctttattatcggcgtattgcaggactcttgcgaaaccgcgctgaactcttcaactgacgtgctgttcactgcggcagcttgccaggcggaagacgatcgtctggcaaatagcgccctgcgtaattaattgtttaacccctttcgtctatggcgggaggggttttctctactttaaacggatcaattccccttttctgcatccgccagaaacgaatgatattcaggccattcataagcagaaaactaccctcaatcatcgtgccgcctatcgaccccgcccagaagttgtgaatcacccagcaacacgttgaaaaccacatcacgcagcgcatggtgagccctttacagcggaacagcgcccaggtactgacaatcgtaccgataaccggcaatagttcgacaggatgatggaacttcgcgaggccaattccgccagtcagcacaataaaaatcgccattacccataagctgcgcgtgcgtaaggtaatcaatgtacgaatggcattaaggatggcactggcaccagcgggataggtgcccagaagaaaaaaatgtacgccaataacggcgctatagaccgaaagctgctttttgaagcgacgttcgtcacgattgaaaaatgttgtgataccaatcagaaaggcgatgacacccacgccctgggccagccaatacgcggtcatgataaatccttatcaggtatggaaaagcaaacggcgcttcacattatgaaacgccgttttttattaacaactcatttcgactttatagcgttacgccgcttttgaagatcgccagttcgcggaagtcgttacgctcgttgcaggtttgtttaccgttggcaaactcaacgatggtgtcgataaattcttccagcaactgcggcatcgctttaccgtggatcagctgacccgcgtcaaagtcgatccagtgttttttcttcgccgccagttcactgttggtagcgattttcaccgtcggtacaaagccgccgtatggcgtgccacgaccagtactgaacagcaccatatggcagcccgcacccgccagggcgctggtcgctacggcatcgttacccggcgcacttaacaagttcagccccggcgttttcagacgctcgccgtaacgcagcacgtcaaccacgacgctggaacccgctttctgggtacagccaagggatttatcttccagcgtggtgataccgcccgctttgttccccggcgatgggttttcatagatcggctggtcatgggcaataaagtactgtttgaagtcgttgaccatggtgaccagtttttcaaacgttgcttcgtcgcggcaatggtccatcagcaactgctctgcgccaaacatctccggcacttcggtcagtacggtagtaccgccgttagcaatcacgtagtcagagaaacgccccagcatcgggttagcagtaataccagaaagaccgtcagaaccaccgcactccagaccaaacttcagttcgctgagtttgcctggctcgcgtttatcgttgcgcatcacgttatacagctgatgcaaatgctcgattccggcttcgatctcatcatcctgctgttggcagatcatgaaatgaacgcgttcaggatcgatatcgcccagcgtttcacggaatgcggcaacctggttgttttcacagcccagaccaatcaccagcactgcgcctgcgttcgggtggcgcaccatgttttgcagcatggtgcgggtattaatgtgatcgtcgcccagctgtgagcagccgtaggtgtggctgaagaggaacacgccgtcggtaccttcagcgttgttggtctctttcagaaaacggttctggatctgccgcgcgatgccgttgacacagcccacggttggcaggatccacagctcgttacgcaccccgacatcgccgttagcgcgacgatagatctgcacttcacgatctgccgcttgcgcaggcagatcctgaaaatcaggttgatagcgatactgatccagatcgctcagattcgtgcgcgtattgtgggcgtgaacgtgttcccccgccgcaatatccgccaatgcataaccaatcggcaggccatatttgatgacgttggccccttttgcgatattcgttaacgcaaatttatgtccacgagcaacatcctggcgcagcctaacagtttggttatcgacactgacttctgtgccttcagccaaatccgctaaagcgaccgcgacgttatccagcgcatggatcttgatgtattgcatatcaaccccagaccttagttcagttcaatggcgaagtagtcacgcgcattgttaaagcaaatatttttcaccatctcgcccagcaggttgatgtccgccggtgcttcgcccgcttccacccagcgaccgatcatctggcacagaatgcggcggaagtattcgtgacgggtgtatgacaggaagctacggctgtcagtcagcataccgacaaagcggctcagcaaaccgagctgcnccagttgggtcatctgacgttccataccgtctttctgatcgttaaaccaccagccggaaccgaactgcattttgcccggcataccttcgccctggaagttaccgatcatggtgcccagcacttcgttatcgcgcgggttcaggcagtacagaatggttttcggcagcaggttttcttcgttctgcttgctcagcagcttagacaactcttctgccatcggacggtcgttgatggagtcaaagcctacatccggccccagcagtttgaactgacgcaggttgttattacgcagcgcgccaatgtggtactgctgtacccagccgcgacgtgcatattcggcaccaaggaacaccagtaccgcagttttgaactgtgccacttcgtgctcgctcagggtttcgccagccagacggcgcgccagaatgctgtccagttccgcttcgttcgcttcagcaaacatcaccacgtccagcgcatggtcagacactttacagccgtgagcggcgaagtgatccagacgtttggtcaaggcagtttgcaggtcagcaaagcggcgaatgtcggtatcggaaacttcgcccagcttcgccatgtagtcgttaaaggtcgcctgttcgatgttgaaggctttgtccggacgccagctcggcagcactttgatggtgaaagagccgtctttggcgatctctgcgtgatgctccagagaatcgatcgggtcatcggtggtgccgaccattttcacgttcatctgctgcatgatgccgcgcncggagaagttatcctgcgccagcagttcgttacattcgttccagatttcatcggcagttgacggagaaagcaatttgccagtgataccaaacggacgacgcagttcgaggtgcgtccagtggtataacgggttgccgatagtgtgcggaacagtcgccrcccaggcgtcaaatttttcacggtcagacgcatcaccggtacacagacgctcggccacaccgttggtacgcatagcgcgccatttgtagtgatcgcctttcagccagatgtcatacaggtttttaaaacgatagtcttccgcaatctgctgcggcggcaaatggcaatggtaatcgaaaatcggctggtcttttgcgtagtcgtgatacanacngcgggcaaattcggtatctaacaggaaatcttcagtcataaacggagtcattttcgtcttcctctcaacgagtgagctagcttgcttatggtgcgatgctgacaaagttatcacaccaatttccagagtccgaagatattttcgtgagttagatcaataaacgtngttaaaaaaattactctcaaagtggtaaatctctctgcaggccgcgccagtactggcctcgctgtcgtcaggtaatgtcccctacaaatattcgcacatttgtgatggctctcaccttttaaagttgtatgacaagttatctttctgccgtcgcaaatcataagtcgacggaatgcaaattgccgattcattcatttgttagatgaatcgggttaaccggtacggaagccgaattagcacgaaactttcatggcaacgttcggggcgtgccggttttttttcggttacccggtcgtaactaacatcttcagcctctggcgggatgatggccgcgcttcctgcggatataacaaaacgatgaggttttacatgcgtaaaattaaagggttacgttggtatatgatcgcactggtgacgctcggcaccgtgcttggttacctgacgcgtaacactgtggcggcagctgcgccaactctgatggaagagttaaacatctccacccaacagtattcctatatcatcgcagcctattctgctgcttatacggtcatgcaaccggtagcaggttatgtactggatgtgctgggtacgaaaatcggttatgcaatgtttgctgtgctgtgggccgtgttctgtggtgcaaccgcgctggcaggtagctggggtggcctggctgttgctcgtggtgcggtcggtgccgcggaagcagcgatgatcccggcgggtctgaaagccagctccgaatggttcccggcgaaagagcgttccatcgcagtaggctattttaacgtaggttcttcgattggtgcgatgattgcgccgccnctggtggtatgggcaatcgtgatgcacagctggcagatggcatttatcatctccggtgcattgagctttatctgggcgatggcatggctgattttctataaacatccgcgcgaccagaagcatctgaccgatgaagaacgcgactatattattaatggtcaggaagcccagcaccaggtgagtacggcgaagaaaatgtccgttggtcagatcctgcgtaaccgtcagttctggggtatcgcgctgccgcgtttcctggcagaaccggcctggggtacttttaacgcgtggatcccgctgttcatgtttaaagtttacggctttaacctgaaagagatcgcgatgttcgcctggatgccgatgctgtttgctgacctcggttgtatcctcggtggttacctgccgccgctgttccagcgttggtttggtgtgaacctgatcgtttcccgtaagatggtcgtaacgctgggtgcagtgctgatgattggcccgggtatgatcggcctgttcaccaacccgtatgtcgcaattatgctgctgtgtatcggtggttttgcccaccaggcactgtctggcgcgctgattacgctctcttccgacgtgtttggtcgtaacgaagtggcaacggcgaacggtttaaccgggatgtccgcatggctggcaagtacgctgtttgcgctggttgtcggtgcactggctgacaccatcggcttcagcccgctgttcgcagttctggcagtatttgacctgctgggtgcgctggttatctggaccgtattgcagaacaaaccggcgattgaggtggngcaggaaacacataacgatcccgcaccgcaacattaacgcttcgtgtaagttttagtttcgcttcaaagccgcctnnncaggcggctttttcatcactgcgagtagagctaaactcgcaaaagtggtataacaaatatagtctgccgtatcatgcctggagcgcatatggaaatcactgaaccacgccgtttgtatcaacaacttgccgctgacctgaaagagcgcatcgaacagggcgtctatctggtgggtgataaactgcctgctgagcgctttattgccgatgaaaagaacgtcagccgtacggtagttcgtgaagccatcatcatgctggaagttgaaggctatgtcgaagtgcgtaaaggttcaggtattcacgtggtttccaaccagccgcgccatcagcaggctgcggacaataatatggaattcgccaattacggtccgtttgagttactccaggctcgccaactcatcgaaagtaatattgccgagttcgcagcaactcaggtaacgaaacaggacatcatgaaattgatggccatccaggagcaggcgcgcggcgaacaatgcttccgtgattccgagtgggatttgcagttccatattcaggtagccctggcgacgcagaactccgccctggcggctatcgttgaaaaaatgtggacccagcgtagccataacccgtactggaaaaaactgcacgaacacattgattcccgtaccgtcgataactggtgtgatgaccacgatcaaatcctcaaggcgctgattcgcaaagatcctcatgctgctaagctggcaatgtggcagcacctggaaaacaccaagatcatgttattcaacgaaaccagcgacgacttcgagttcaatgccgaccgctatctgttcgccgaaaacccggtagtgcatctcgatacggccaccagtggcagtaaatgaaatacctgtccgacaggcgctgcgacgcgcctgtttgtctcgtcggtaagcgaaaagtataaagtgtcagcctgtgtaaatcctctcgccaccctcccctgcattcagcaaaatcagactccacggacatgtaattttgataacgaacaacgttgacctttgttacaattagattcaatttgaatttatgtttttgaatgctttcttatctcacgatttaacagggaatagttcaggctgtgttgatgtatcaaacccgcagaacataccaaaacagcaataacattgcggtagtgcatcttttaaaaccagcgtggcgttaaccgattcaccaggaataatgaatggaacttttgacccaattgctgcaagccctgtgggcgcaggattttgaaaccctggccaatccatcgatgattggcatgttgtattttgtcttgtttgtaattttgttccttgaaaacggcttgcttccggcggcctttttaccgggcgacagtttactggtattggtcggcgtgttgattgcgaaaggcgcgatgggctatccgcaaacgattctgctgctgaccgttgccgccagcctcggctgctgggtcagctatattcaggggcgatggctgggcaatacccgcaccgtacaaaactggctatctcatttacccgcgcattatcatcaacgcgcacaccatctttttcataaacacggtttatcggcgctgttaattggtcgctttattgcgtttgtcagaacactgctgccgacgattgccgggttatcagggctgaataacgcgcgctttcagtttttcaactggatgagcggtctgctgtgggtattgatcctgacaactctgggttacatgctcggcaaaacgccggtatttttaaagtacgaggaccagctgatgtcatgcctgatgctgctcccggtggtgctgctggtgtttggcctggcaggttctctggtcgtattatggaaaaagaaatatggaaatcgggggtaagggatgcaaatacctcgcatgtcgcttcgccagctagcctggtccggcgctgttttacttctggtcggcacgctgttgctggcctggtccgcggttcgccagcaagagtctacgctggcgattcgtgccgttcatcaaggcacaacgatgccagacggtttttcaatctggcatcaccttgacgctcatggcattcctttcaaaagtatcacccccaaaaacgacactctgttaattacctttgactccagcgaccagagcgccgctgcaaaagcggtcctcgacagaacattgccccaaggctacatcattgcgcagcaggacaataacagtcaggctatgcagtggctgacccggctacgggataactctcatcgcttcggataacttcctgttgtccgaaacagatcactcactttggtgatttcaccgtaactgtctatgattaatgaggcggtggttaacactaccgcttcgttgtctggacaatcgttcctttgtaataggtccgaatcacaatggaaggttcaagaatgaaataccgcatcgctttagctgtttctctttttgctcttagtgccggtagttatgccactaccctgtgtcaggaaaaggagcaaaatatccttaaggagatcagctatgccgaaaaacaccaaaaccagaatcgtattgacggtctgaataaagccctgagtgaagtccgggccaactgttcagatagccagctgcgtgccgatcatcagaagaaaatcgcaaagcagaaagatgaggtggcggaacgccagcaagatttagccgaggcgaagcaaaaaggcgatgccgataagattgccaaacgcgaacggaaactggcagaagcgcaggaagagctgaaaaagctggaagcgcgcgactactaactcacaatagtcactacttactcacctggagaaaactatgtcgaaagaacacactacggaacatctgcgtgctgagttgaaatccctttccgatacgctggaagaggtgcttagctcatctggcgagaagtcgaaagaagagttgagtaagattcgtagcaaagcggagcaggcactgaaacagagccgttatcgcctgggtgaaaccggtgatgccatcgccaaacaaacccgtgtcgcggcggcgcgtgccgatgagtatgtgcgtgaaaatccatggacgggcgtgggcattggcgctgcaatcggtgtagtgctcggcgttctgctgtcgcgtcgttaattatggcggacactcatcacgcgcaagggcccggtaaaagcgttctgggcatcgggcagcgaattgtttccatcatggttgaaatggtggaaacacgtctgcggctggcggtggttgagctggaagaggaaaaagctaatctctttcaacttttactgatgctgggcctgacgatgcttttcgctgcatttggtcttatgagcctgatggtgctaattatttgggcggttgatccgcaatatcgcctgaatgcgatgattgccaccaccgtggtgttgctgctactggcactgattggcggtatctggacgttacgtaaatcgcgtaaatccaccttgctgcgccatacacgccatgagctggcaaacgatcggnagctgctcgaggaggagtcccgtgagcagtaaagtcgaacgtgaacgacgtaaggcgcaactgcttagccagatccagcaacaacggctggatctttctgccagtcgtcgtgaatggctggaggcaacaggcgcttacgatcgtcgctggaatatgctgctaagtctgcgctcctgggcgctggttggcagtagcgtgatggcgatctggacgattcgccatcctaatatgctggtccgctgggccagacgcggttttggcgtatggagcgcctggcgtctggttaaaacgaccctcaagcagcaacagcttcgcggttaacttccctctggccggagccattccggccttacccatcaaattttttgaagatttttgacagttttccttgctaacaatcatcattcaccacgtttatgattctctccatcgacagcaacgacgctnataccgcgcccttgcacaaaaaaacaatcagcagcctgagtggcgcagtggagagtatgatgaaaaaattagaagatgttggtgtactggtagcgcgcattttaatgccgattctgtttattaccgcaggctggggaaaaattactggttacgcgggtacccaacaatatatggaagcgatgggcgtcccgggttttatgctgccgctggtgattctgcttgagtttggtggtggtctggcaatcctgttcggtttcctgactcgcaccacagccctgtttactgcgggctttacgctgctgacggcatttttatttcacagcaactttgctgaaggcgtcaactcgctgatgttcatgaaaaacctgacaatttctggcggattcctgctgctggcaattaccggtccgggcgcgtatagcatcgaccgcctgctgaataaaaagtggtaagcacgcgctatacttaacgataaaaaacgaggaggaagctcctcgtttttgctattggaggagagaacaatgggtcaactgattgacggcgtctggcatgacacctggtacgataccaaatctaccggcggtaaatttcaacgttcagcttccgcatttcgtaactggctcactgccgatggcgctcctggccccactggcacaggcggttttatcgcagagaaagatcgttatcatctctatgtttcactcgcctgcccgtgggcgcaccgcacgctgatcatgcgcaaactcaaaggactggaaccgtttatttccgtttccgtagtgaacccgctgatgctggaaaacggctggacctttgatgacagttttccgggagcaaccggagacacgctctatcaacatgaatttttgtatcagctttatntccacgccgatccacactacagcggacgagttactgttcccgtgctgtgggacaaaaagaaccacaccatcgtcagcaacgaatcagcagaaatcatccgcatgtttaataccgcgtttgatgcgctgggcgcgaaagcgggtgattactacccaccagccctgcaaacgaaaattgacgaacttaacggctggatttatgacaccgttaacaacggcgtgtataaagctggttttgccaccagccagcaagcctacgacgaagcggtggagaaagtgtttgaatcgctggcgcgactggaacagattttaggtcagcatcgttacctgaccggcaaccagctaaccgaagccgatattcgcctgtggaccacgctggtccgttttgatccagtgtatgtgacccacttcaagtgtgataagcaccgcatcagcgattaccttaatctgtatggcttcctgcgtgatatctaccagatgccgggaattgccgaaacagtcaatttcgatcatatccgtaatcattacttccgcagtcataagaccatcaaccctacgcggattatttcaattggtccgtggcaggatctcgatgaaccgcatggacgagatgttcgcttcggttaaaaaaagcaccttacgaggtgcctctgataattagctaagtgcatgttgttcatgtcggatgcggcatgaacgccttatcaaacctacaaaacttttatattcaatatgttgcaatgaccgcgcgggccagataagcgtagcgcatctggcaattttgcgcttgtcatcagtcttagcgcgccttcacagcactttattaattccttgaacgaatatttactgccatttcattcacgtctattcttaatttgctgctttaaaaacaagtgattgagcaaaattgaggcaaaaatggactggtatctgaaagtactaaaaaattatgtcggtttccggggtcgtgcgcggcgcaaagagtactggatgtttattctggtcaacatcatctttacgttcgtgctggggctgctggataaaatgttaggctggcaacgcgctggtggcgaaggcatcctgacgacaatctacggtattctggtgtttttaccgtggtgggcagttcagttccgccgcctgcacgacaccgaccgctcggcgtggtgggcactgctattcttaatcccgtttatcggctggcttattatcatcgtctttaactgccaggcgggtacgccaggcgaaaaccgctttggacctgatccaaaactggaaccttaaaacaaatctgctcgccggatgtctgactcatccggcttttatcatcatgttgatgaatgaataatttactaatgtttatttaaaatatttcaatgtcgttatataaattacctataaannnnaccatgtatttatcttaaatatcaaaacctttataacatccgaaaaagaaagatacgaatagcatttacacaatacccggaatagactttcgtcacttttaattaaagggatgtttttatgcagtggtatttatccgtattaaaaaattatgttggtttctctggtcgcgcacgtcgtaaagagtactggatgtttactctgattaacgccatcgtcggcgctattatcaatgtcattcaattgattttaggtctggagcttccatatctgtctatgctttatttgctggcaaccttccttcccgtccttgcgcttgctatccgtcgcttacacgataccgaccgttcaggtgcctaggccttgctcttttttgttccgtttattggctggctcgtgcttctggtttttttctgcacagaaggtacttctggcagcaatcgttacggaaacgatccgaagtttggttcaaattaatcttagaattggggcgatatttcgcccctttttattannnnnnnnnaatattattttccgttaaaaagtttgggaatttcccgcagacaccaggatttcgcttcccccatactgtcacgacgccaggccataataatatcgatctcgctggtcgattccgggctgacgacacgcaaccgcccttccgcaatatctttttcgaccatcggatacggcatcgtcgccacgccaagccccgccagtaatgcctgacgtttatcttcaatcgtgctcaccgttaagcgcggctgtttgtccagcagctgtacagtcaacaccgggcgctcacgagcggtatccgccaccgcaattccacgatatttcacacgcgtcacttcagataacggttccggctcctgatgaatcgggtgatcaggcgcggcaacgtagacgttcattaacgtatagagcttgcgcgagttgatctccgacgaggaacgaaaatgcatatccggcgcgataacnatatccgcccgcccctgctccagccgttcccacgcccccgccagcanttctgtgatgattgccagttgggtattggcttttgccgccagtttgtcgattaacgggaaaaaggcaggtgtcggtaccagcgcttcggtcacaatggtgagatgcgtttcccaaccgcgcgcgagagcttccgcatcagtagtcagtttatctgcggcttccagcaaaacgcgccctcgctccaacaacatcctcccgacattggtgaatttggtgcgatggcccgagcggtcaaacagcaccacatccagctcttcttccagtttttgcatggtgtagctaagtgcggaaggcacgcgtcccagntcatccgctgccgccgcaaaactgccccggcgatcgatcgcatccataacccgtagtgcttccagcgttaatgccctttctttggccatttcgttctcattcaggaaatttgaacataccgggcagaatatctggctaacaatgtagcgtccagccccttaccataaaaggaagtaaagagaggtcaagaattatgattactacccgaactgccaggcagtgtggacaagcagactacggatggttgcaggcccggtatactttttcctttggacactacttcgacccgaaattgttaggctatgcctccctgcgtgtgcttaaccaggaagtgctggccccaggtgccgcctttcagccgcgaacntatcccaaagtcgatattttaaatgtgattctggatggagaagcagagtatcgcgacagcgaaggcaatcatgttcaggccagcgccggtgaggcgttgctgctctctacccagccgggtgtcagctacagcgaacacaatctcagcaaagacaaaccgttaacacgaatgcagctttggctggacgcctgcccgcagcgagagaatccgntgattcaaaaactggcgcttaatatgggcaagcagcatttaatcgcctcgccagagggtgcgatgggaagcctgcaattacgccagcaagtgtggctgcaccatatcgtgctcgacaaaggcgaaagtgcgaatttccagttgcatgggccacgcacgtatttgcaatcgattcacgggaaatttcatgcgcttacgcatcatgaagagaaagcggcgctgacctgcggtgatggggcgtttattcgtgacgaggctaacattacgctggttgccgattccccactgcgcgctttgctgatagatttgcctgtctagttgtttttacagggagatgatgatgagtaaaaaatcggccaaaaagcgccagccagtgaagcccgtggtggcgaaagaacctgctcgcaccgccaaaaattttggctatgaagagatgttgagcgagctggaagccatcgtcgcggatgctgaaacgcgtttagccgaggatgaagctaccgcgtaaagacaggttgccggatgcggcgaaaacgccttatccggcctacaaaatccaacaacattaacgaattaaacaacccgtaggccggataagatgcgccagcatcgcatccggcacgatacccaaaacctggcgtttatctggccttgctcgccataatctcgataatctgccgatccgtttgctgcatcgaatggcttgctaacgcacacaggttggcaatcgactgctcaacatcatgcgccacgatcccttcattgccggtcacggcggtatcatccagcgccattaacaccgctttccacgcagccgaagcactggtcgaaaccttcatcgcgcagctgttcgacgcaccatcgcaaatcatgccgctgacatcgccgatcatactgctgatcgccatcgagatggtttcataacgcccatccaccagccatgccatcccggcggcggcccccattgctgcggtcgttgcggcacacagcgcagacaaacgcggtaactggttatggatgtaaattgcgctcaaatgagaaagcatcagcgcacgcgccagccgttcatcatccgctccgaagtgttctgctaccaccaccacgggcattgttgcggtgatcccctggttacccgagccggagttactcattgccggaagcgnnnnnnnnnnnnnacgcgcatcggatgccgcgctggtacgaatcacaatggatgaagagagatctttcgccagcaaaccgcgctcgcactgtttttccagcgtcgcgccaatatgcagcccccacttaccgctcaaaccttcctgcgataacgcacaatttagcttcgcggaatcgagaataaagcggatcgccgcaaacgggacttcattgacgaacttcaggatctcagccagcgtcgttctggaaagcaccgatagcggagactcttgctcgccctctgccacacacgcctgctgggtaaacaccacaccatcgtgcgtctcaatatgcacaatgttggtatgcccgccgacgatagtgacacacgcccacttctcaccgttccagactttggcgcgtgagaagaggatttcattgcaaggttcctggatcttaacggagactttccccgccgccagcagtgctttggcatcggcaattgcctgcgcagttgcgtctttcagcacttccagcccggcgttggcatttccacctaacgcccccagcgccgccgcaatcggcagccccaccattcccgtgccgggaacggtgacgcccagaccgttcttcatcagatttggcgaaacccaggcttctacacgttcaaccggaccttccagttctgccgcagcaaccgccgccgccagcgccagtgaaatcggttcagtacatcccagcgccggttttacttcctcctgaacggcgaggatgtaacgctgccataacggatttaaagtcgaatcaaacatattaaaaaccttaaaatttcaggtaaatcaagaaaatgccaggaacggagaaacacaaagcaacaaaccagtgacgataatcaggtacagagacatccctttgtatttgtgcaatgccggtactttgtaaaccagccacgccgggatcaggcaccctaccaagccgaaaatcgggctacagatagaggtgaagctcaacaccggtgcgttcagtacgatggcgctccaggccagcaaaatggcgaaaatcatgatgccgcgctgaacaagattttcgttaatcttctcggcaggcatcttgcgacgcaggatgttcattacgatcccttgcgttgcttcgcgaaaacctaaatagacgccaaagaatgcagtcatgacagcaaagatattgagaatgacgctgaccactttcacccacgctgcgccgtcaccgctaataaactgtgcggcaatcgccagcgcggaaatattctgctcgtaggcttttaccgcttcgtcatgtcccatcgccagcgtgaacgacacggcgtagaaaaagacggtgataaacaaaatgccaaacgcgatattcattgcccgcaatgctttatgccgcgctacttcaatcgatttttcccgcgagcgataagagatcaccatcgggcttaacgtctggataaacagaatcgacgtcagggtaaacggcagcgtaataatagcgtttttcaccagcagccccagcggcggtagcgaaccgacgttatacagatgccacattcccaccatcgacacgcccagcgccgcgaccaccagcagcttggtcagcaccatgccagtcgaaattttgaataacaatttctcgccgcgtgaagagatcgccaccagaatgcaaatcagtaccagaccataaaagggactgtctgacagcaacccttccgtcacgccgaaggtatgcaggtaggaagcactatcgttggtgatggcggtggaatagacgaacatccaaatcaccagcattacgaaatagagtgcacctaacaggatgccccagtttttacctaaataaccgctaatgacgctcgggtaatctttacattctggtgattctgccagcgtattaataaacaaccgctgaaacagatacattgccgggtaaccaatcaccgatgagagcaaaaatacccacaatcccatcaaaccgacctgcaccgggagaaaaacaatccccgcgccaatcgccatcccgatactcataatcacccagccggtgtcagtactgtcgaatttgatcgcttctcgccactcgctctcactcattccagcacgacccgccggggtcgaagcgtctgcaatgacgcctttattcgatgcaatttccataatttctcgctcaatattttgtagggcttattatttttttccgagccgcatcaaggcgatatgcggtctacgtttttgcaggcgagttattagaataaagaaatgatacgcgcgaggtcagagaaaatcttcacaatcaagactttgaaataacggagatggataagaattttctactaaattaatcgcaagagaatattcattctctatttgcggcagatcacaaaaaaaaggtgcacatttgtgcacccaaggatgaaagctgacagcaatgtcagccgcagaccactttaatggccagtcctccgcgtgatgtttcgcggtatttatcgttcatatctttgccggtttcatacatcgtctcgatcactttatcgagtgaaacacgcggtgccgaggtgcggcgcatcgccatccgcgcggcgtttactgctttcacggcattaatggcattacgttcaatgcacgggatttgtacctgtccggcaaccggatcgcaggtcagtccaaggttatgctccatcgcgatttccgccgcattgcatacctgcgccggactgccgcccagtagttcagttaaccctgccgccgccattgaacaggccacgccaatctccccctgacagccgacctccgcgccagagatggaggcgttcattttatacagcgcgccaatagccccggctgcaagaaaatagngggcaattgaccgctcgtttaccggacgacggaacttatcgtaataagccagcactgccggaataatgccgcacgcaccgttagtcggtgccgttaccacgcgcccgccagctgcgttttcttcactaaccgccagcgcgtacatgttgatccagtcgatgacattcatcggatcgttagagatgttatcgctggaaaccagctgacgacgcagcgctacggcacggcgcggcacattgagcggaccaggcagcacgccttcagtgttcatcccgcgttcaataccgtcatgcatcacttgccagatacgggcaaaaccggcgtcaatttccgctttactgcgcagcgctagctcgttgtgcatcatcaggccagaaatagacaggccgttgtaatcacacattttcagcagttcacctgctgagtggaaatcgtaaggtacgggtgtttcgacatcgtgcgacaggccgaagtgttcttcttcgacaataaacccgccgccgacagagtaataggttttacttaatagctcttcctgtgccttccaggcagtgatccgcattccgttctcatggcgaggcaacatttcgggatggaagataatgttctttgctacaggaaaatcaacaatatgcgcaccagatgccactggcagccgcccgctgcgcgttactaactctataaatgcagggatctcatcaatgacaacatcctgcggactgtttcctgccagtcccatgatgatggcgacatccgtggcatggcctttgcccgtcagtgacaacgacccgtacagatcgaccacaatatggctcgtcgcggttaataagccgctactttccagccgatcaataaaactttttccggcattcattggccccacggtatgcgaactggagggaccaatcccaattttgaaaatatcgaatgcactaatcatatccacaccctcggattgccgttcagtgaagtggagcggaacgaccttacgaccgtcccgctcacgaggctttacgcactacgtactgcgatagcttcaatttccagcttcacatctttcggcaaacgcgcgacctgtacacagctccgggtcgggtaggtcgcctgatgctcatcgaagaattgcttatagacttcgttgatggtggcaaaatcattcagatcggtgatgaacacggtcatcttgatgatatcgcccacgctcagcccggcagcaaccacgatcgctttgacgttttcgaggcttaaacgcgcctgatcttgcacatcagccgggatctcaccggtctgtgggcaaaccggaatttgaccggaggtgaagaccatgctgcctaaatcaacgccttgaacataagggccgattgcgcctggggcacgttgcgtttcgataatctttttcatacatcctccggcgtcagagcgcctgggtaaaggtacgtgaaataacatcctgctgctgttcacgggtcagtgcgttgaagcgcacggcgtagccagagacacggattgtcaggttaggatatttttccgggtgctcgatggcatccagcagcatttcccgattcattacgttgacgttgaggtgttgaccgccttcgacatccgcttcgtggtggaaatacccatccagcaggccgacaaggttggttttacgtactggatcttctttgcccagcgccgcagggacgattgagaaggtgtacgagatcccatctttggcgtaggtgaacggcagtttcgccaccgacgtcaatgaggccacggcacctttgcggtcacgaccatgcatcgggttagcgcccggcgcgaacggtgttnnnncgcgacgaccgtccggcgtgttaccggttttctggccgtacaccacgttagaagtgatagtcagaatcgactgggtagggacggcgttgcgataggttggcagcgctttaattttcttcataaaacgttcaaccaggtcgcaggcaatgctgtctacgcgctcgtcgttgttgccgtactgcggatattcaccgtcgatttcaaagtccaccgccaggccgttttcgtcacggattggtttcacgcgggcatatttgatcgcagacagggagtccgttgccaccgacaggcccgcgatgccgcacgccatggtgcgatagacatcacgatcgtgcagcgccatcagcgaagcttcgtagctgtacttgtcgtgcatgtagtgaatgatattcagcgcgctgatgtactgcaccgccagccagtccatgaagtgatcgaggctgtccatcactttgtcgtaatccagcacatcgtccatcaacggtgccgttttcggcccgacctgaatcttcagcttctcgtccaccccgccgttaattgcgtacagcagtgttttcgccaggttagcgcgtgcaccaaagaactgcatttgcttaccaatcaccattgggctgacgcagcaggcaatcgcgtaatcgtcgctgttgaagtcagtacgcatcagatcgtcgttttcatactgcaaggaagaggtgacgatcgacacctgcgcggcatattttttgaaggcaatcggtaattcttccgaccaaagaatggtcaggttaggttccggtgcaggccccatagtgtgcagggtgtgcaaatagcggaaggagtttttggtcaccagcgtacgaccgtccagccccatcccgccgatcacttccgtcgcccagattgggtcgccggagaacagcgaatcaaattccggcgtacgcaagaagcgcaccatacggatcttcatgatgaagtgatcgatcagttcctgtgcctgctgctcattgagtacgccagctttaaagtcgcgctcaatgtagatatccaggaacgatgccgtgcggcccagcgacatcgcgccgccgttctgtgatttcactgccgccagataagcgaagtagagccactgcaccgcttcctgcgcattctgcgccgggcgagagatatcaaagccatatttcgccgccatttcctgaatctgcaacagcgcatgacgatgctctgccagctcctcacgcagacggatggtggcttccagatcctcgcctttttccagacgagactggagatcggcaaattgcagttcgcgttcacgcaccagataactgatgccatacagcgctacgcggcgatagtcaccgataatgcgcccacggccatagccatctggtaaaccggtcagcacgccagatttacggcagcgcagcatatccggtgagtaaacatcaaatacgccctggttatgggttttacgcagatcggtaaacagatattcaaattcactgtccatttcacgaccataggcgtggaatgaacttttaatcatattaatgccaccgaacgggtgtaacgcacgtttcaacggcgcatccgtttgcaggccaacaattttttccagcggctggttaatatatcccgcatcatgagcggtaattgtggtggcaatattggtatcgaaatcaaccggcgcgtgggttgcgttttcaatacgaatgccttccatcaccttttcccacaattccgtggtggctggcgtcgcttcagcgaggaaagattcatcgccttcatacggtgtatagttatgttgaataaaatcgcggacattaatttcgtttttccagtccgtacctttaaagccaagccatgcgtcggcgtacagcttatcgctngtatcaatatctaccttcatgaaaaataatctctctacaatacttcaactaaattatgcaaattctgcgggtgcgttaactttgcctaaatgaatggcatccaaagcaatcattttttcttcgttggtcggaattacggcgcaaatgacacgcgcattttcactggaaacaattcgctcgccaaaagagttagatcgattattcatttctgtatcaatctctacgcctaatacagccaaatgttccatgaccagacgacgaattaaacttgaattctctcctattccgccggtgaatataattccatccaggcgacgtaatgaagctgcgtgtccggcaatatgacgggcaattcggtgaacaaaggttttaattgccagctgcgcgcgttcgtgaccttcatgccaggctttttccagaacacgtaaatccgaagaaaggccggaaatacctaataatcccgactctttattcactacgcgttccaggtcccccaggctctggttggtttggctggcgacccaggacatcgcaccaaagtcgacatcgccactgcgggtacccatcatcaagccttccagcggcgtcattcccattgaggtgtcaacactctgaccgttgcgaactgcgcagattgacgcgccattgccaagatgcgccacaaccaggccggagtcatcttccgccagattcagcaaagaatgtgcgcgctgggaaacatagcggtgcgacgtgccgtggaaaccataacggcgtacacctaactcttcataatatttccacggcaggccgtataaataagcttccggagccatcgtctggtggaaactggtatcaaataccgccacctgagttacgcccggaaataattgctgcgccgattcaataccacttaaattggcgtaattatgcaggggtgccagtggagaaacgcgacggatattatcaatgacttcatcggtaataatggcggactcggtaaaaatactgccgccgtgagcgatgcggtggccaattaaggccacgctgtcatttaaattccgtttttccagttcaaatgcaattgccttcaatgcaccttcgtagctgtggtgagccagcggtgctggctctcccccatttacggataagaatgcattttccgagttaataccgtcggcaatacctgacattaatacttcacagtcgctggcatcgagtacggaaaacttaatcgaagacgaaccacagttaataaccaaaacaaccgggaattcattcatctcttttctcatcctgagttacggattaaaacagtttatatacgatgttcaggatggtcagcagaccaatcacggtaacaaacacgttatccagacgaccacggtatttcgccagagacggcgctttacggatggcatacatcggcaacaggcacagcagggatgcgataatcggtgcgcccatggcttcaatcaggtcgaggatgttcgggttggcgtaggcaacaacccaggtggagcccatgatgaagatcatgctgatagtgttcagtttacccagcgatactttagttttgtcgcctttataaccaaacttcaggaccaggccattcagaccttccagcgttcccagatagtgaccgaagaaagatttgaagatagccacgagtgcgatgatggaagccgcatattccagtgtaatcgcgaacgttgttttggtaccggtcatggacgcaaagtggttagccagataagaaagcactggaatattctgcgctttggcttccgccatgttggccggagacagcgtaaacaggcagctaaaggcaaagaacatcaccactgcaaccatcagcatgctggcacgagaaatgatttgggaacatttacgttcggtgaagtcgcgaccgaagtctttctcatactcttcacgtttagaaaccacgaaggaagagacgattggcgagaagttaaaggagaaaaccatgatggaaatccccagccagacagtgatcaggataccgtcatgaccggttaacgacagcgaaccgaggtcaacctggtcgataactgcagagttccagtaagggatcagcgacaaagaaatcagcaccaggctggcgataaacggccataccaggtagctcatcactttaaccatcagatccttaccaaaccagatgacgaaagccatcagcagcaacaggaacagcgccacaaagccgcgattcagcggtgcaaagccgagctggttttcccagaacgtcataaaggtattggtaatagtaacgccataaatccacagcagtgggcaaatcgcgaagaagtacaggaacgtgataaccacgccgccagttttaccaaaatgctcttccaccgtttccgtaatgttgccggaagggttagagccagaaagacacagacgcgccagcgcccggtggcaataaaatgcgatggggtatgccaataccaacatcagaagaatcgggatcagtccgccaaaacctgcgcggatagggaagaacagcaccccggcgccgattgccgtaccaaacaagcctaacgtccatgtggtatctgatttacgccaggacgattgttttgtctggctggatacaatgctatctgaagtactcatatcctatcctcaacgaattaattaagcgtcaacgaaaccggtgatttgagagacgcgagaaagatcgatattgccgccggaaataatactgacggtttttctgttttgaatatattggtctaatttaccgcttaataatgcagcacatgccagagcgcctgcgccttcggtgacgactttattgcgctgaattaaggcaatcatactgtttctgatttcgtcttcgctgaccagcacgatgtcatcgactaattcacgaacgatttcgtaagttaaattacccgggcgggagacatcacaaccatccgccagggtgccggtagttcggtgcgtggttatttctccggagtggaaagaagccgccatgccgtgaacgttttcagactgtacgccaataacacgaatggtcgggttaatagatttaattgccaccgcaataccagcaattaaaccgccaccaccaattggcacaatcacgttatcgacatcatagagatcttccataatttccaggccaatcgttccctgaccagcaatcactttcggatcatcgtaaggtgggataaaaatacggccttccatttcgacaatttcgctcactttagcgatagtgtcgttgaagttatcaccatgcagaacgacttctgcggagtagtcgcacgttgccgctactttggatttcggcgcgccttttggcatcaccactttaccgtcgatacccagcatcgcgcaggagagcgaaaccccttgcgcatggttgcccgcagaacaggccaccacgcctttgcgtttttccgcatcagtcagtgaacttaatttattaaatgcgccacgaattttaaatgaacccgtacgctgcatattttcaaacttcaggaatatttcacctttgcaacgttcactaaaatagttggagcgaggcatgcctgttttataaattcgcccagccagtcgttgtttcgcttcaataatgtcatcaatagcaaccggcagatcgtatgtaatatgcattataaaacctcttcgcctgaattaaatatgtaggtaaccgtaaccgacacctgcaagacagacaggtggattatttatgtttaaanaaaaacaaataactaaccaacttctattaattgccttcgtctacacccattataagatgaatactctttggctaattccaccaaaaccgatgctgcttttttaatacgataatttttcgaccataccgcggcatattgtgccacaggtaatgtttcttcaaccggaatagtaataaattgattagaaccaaaaggagacgtcatatcacaaggaattacagttaagaaatcagcattgagaacaagattataaattgtcacgactgagtcggttttaacgatgttttcaatactgatgccatttctttgtaacgtagtaagcagttcgctgtagtaccccatattagtttgtggcaacacccactgttcgttcttcaacgactccagcgtggtggtgccggtgcatgttcgggacttactggctaccagcacaaactcggactcgaacagcggctcaacatgtaaatcctgaagcttcatttctgcgcttaacgtaccaatcgcaaaatcaagtcgaccgtcgcggattgccggtaagaacgaagacagttgcgcttcatacatagaaacctgcgctttcgggaacacctctttgaacttgttgatcatccctgacataaaagtaaaaccaatcaatgaaggaaaaccaaatgagacttccaccaccgcctcagaagacataccgcttatctcattaaccatatttttcatttcacgggtaatggattcggaacgagagagtaacaattgaccggcaggtgttaatgttactccggtatttttccgcaccactaattccacaccaaaataatcttcaatatcgttaatgattttactgacggccggttgagttaaccctaattcttttgcagccgagccgatagaaccacttctaatgacttcctgaaagactaccaggtgctgcgttttcggaagaagaatagtgctcataacgacctacgttaattacctcattgacggcatgaagtgtatcaaaatgaaatgaacaggatatgtgcgaccactcacaaattaactttcaatactttccagggtatcgtcatgccaattaaatacctttaaatatcaataagttaaagtataaaaatcagcataaaccctgatttttgtcaaaaanannnncggggataaccatattttatggcgataacatcattcgttatgtggttaatacaaaaaaggggctgagaccatatttcaagcaattaccggataattaccaggcaaaatttgagttaaatttaatgagcaagttctcaaattttattataaataaaccattttcagcgataaataatgcggcacgtcacattttttcacgctatttgttggagaacaaacatttattttatcnnnntttnnnnnnttcgaatacaggtattgatcatctcgaacaattgattaacgtcaactttttctcttctgacaggacgtcattttgtgaatgcaatcgttttccataaattcttctcccttcataggcgacgaatagcattttgtgttgaggatcacaaaacgaataattgctgatcgccgcgataaggtcagacaaagacaacaagggaaattttcacagagcttttgatcggcgtaggccacagaatgttgcttcgtttactgtaacgccgggtaaatgagcgttttttgatagtgcgaaagaaccctgcgaggaaaataancatctattattgtttgtcatgatgacaaggcaggcatcaatgaaaggcttcccaattgcacatatttttcacccttcaatcccaccaatgcacgcagtggttaacaatcacaatagaaatattgattattggacggtaaaaagaaagtttgcagaaattgtctccaccaatgacgttaataaaatttacagtataagtaatgaactgcggagagtattatctgcaattactgcattgaatttctatcaaggcgatgttccttctgtcatgatccgaatccaaccggaaaatatgagtccattcatcatagatatttctacaggagaacatgacgattatatcatacaaacattagatgtaggcacttttgcaccttttggcgaaaaatgtacttgctcagccgtcaataaaaaagagctggaatgtattaaggagacgatttctaagtattgtgcaaaattcacccgaaaagaagccatcttaacaccccctgcgtactttaataaaacnagtattacttcagattgttggcaaattctctttttttcacccgatcattttaataatgatttttattgattatttataaaggataaaataatgttccctgtttcatcaattggtaatgatattagtagtgatttagtccgtcgaaaaatgaatgacctacctgaaagcccaacaggaaataacctcgaagcactagcaccaggtattgaaaaactaaaacagacctctattgaaatggtcactttacttaacacgttacaacctggtggaaaatgcattatcactggtgattttcaaaaagaattagcgtacttacaaaatgtaattctttataatgactcgtctcttcgtctggattttttaggttataacgcccaaattattcaacgatcggacaatacttgtgaacttaccattaatgaaccgttaaaaaaccaggaaatatccacaggtaatatcaatattaattgcccattaaaagatatttacaatgaattcaggaggttaaacgtaatttttagttgtgggactggagatatcgttgatctatcctctctggacttacgtaatgtcgatttagattattatgatttcacagataaacatatggctaatactattttaaatccttttnnnntgaattcaacaaattttactaatgccaacatgtttcaggttaattttgttagttcaacacaaaacgccaaaatctcctgggattatttactaaaaataacgcctgttttaacaagcattagcgatatgtattctgaagaaaaaattaagtttgtcgaaagttgtttaaatgagcttggagatattaccgaagaacaattaaaaattatgagatttgcaattataaaatctataccaagagcaactctcacagataaattagaaaatgatttaacaaaagaaatatataaaagctcatcgaaaatcaataattgcttgaacagaattaaattaccagagatgatagatttctcatcagaaaaaatacataattatatcgacataatcattgaagattatgaaaatatcaaagaaaatgcttatctggtcattccccaaattaattatactatggatttaaacatagaagactctagctcagaagagttattttcagataacaccctcgagaaagacgaaaattctccggacaatggttttgaggtcggggaatataacacatatgaagcatataactcagagaatcaatattttaccagagagaactatacgtataattacgaccttttaaatgcaatatagacttaataacttcttacaaagtctwttattaataccgtagatatttattcatcttaccctgtgcaccaaaagcaaaaacccgccgaagcgggtttttacgtaaatcaggtgaaactgaccgataagccgggttctgtcgtggacagtcattcatctaggccagcaatcgctcactggctcaagcagcctacccgggttcagtacgggccgtaccttatgaacccctatttggccttgctccgggtggagtttaccatgccacggactgttaccagccgcgcggtgcgctcttaccgcaccctttcacccttacctgatcccgcttgcgcgggccatcggcggtttgctctctgttgcactggtcgtgggtttcccccccaggcgttacctggcaccctgccctatggagcccggactttcctcccctccgcccgtctcccccgaagaggacgacgacgaagcggcgactgtctggtcagcttcggcgcgcagtatagaggntttgcgcgcccttgtcaccccgcgttgcgcattccaatcgccagtgtcgcggcgatattacgtgaagcacggcagatattgtcataagccccgcggaatgcttcgtccaacgtacctatgctggtcaatacgctgaagaccgcatcaatgccatgctgatgtacaacgccaacatcatcggtcaggctacccgcaatgccaatcaccggtttatggtacttcttcgccacgtttgcgacaccaatcggtaccttgccgtgaatactctggctgtcaatacgcccttcaccggtgatcaccagcgtacaatcgtgaatatgttcctccagattcagcgccgtagtgacgatttcaataccacttttcagttccgcaccaagaaacgccattagcgccgcgcccataccacccgcagctcctgcgccggggacatctttcacatcaacatgcagcgcttttttaatgacctcggcatagtgagagaggttattgtccagctcaacaatcatcgcttcactggctcccttttgtggnccaaagatgcgcgatgcgccgttatcgcccaccagcggattggtgacatcacaagcgacgcgaatgacgcaatcttttaagcgcggatcgaggccggaaatatcaatatcattcagagtattaagactaccgccgccaaaaccaatttcattgccgttggcgtcgcataatttcgcccccagcgcctgtaccatgcctgcgccgccatcatttgtagcgctgccgccaatgccgataataatgtttgtcgcgccgctctccagcgcctgcaggattaactcgcctgtgccgcgtgaagtggtcacgagtggatcgcgtttttccgcaggtaccagctccagcccactggccgccgccatttcaataaacgcggttttgccatcgccggagatcccccaactggcattcactttctcgcccagcggccctgtaacccaggcgtgacgttcggaaccctgggtggctgcaatcatcgcttccaccgttccttcgccaccgtcggcaacaggaacagaaacgtactgtgcatcaggaaaaatttcccgaaatcctttttctatcgcctgcgcaacctcgctggcagataaactttctttataagagtctggggcgattacgattttcatacctatgcctgttaccacatgacgccggagggcgtttctcttattcggcctggattccaggcccggattgcaatacgccatccgggcacgacgtcattaacgagtaacttcgactttcgccagtttttcgtagtagcacgccagggcgctatgatccgccgttcctaaaccatctgcacgcagtgcctgcatcatctccataaccgcagctgtgagcggcagttgtgcgccgacgccgtgagaagtatccagcgcattcgccagatccttaatatgcagatcaatacggaagcccggcttgaagttgcggtccatcaccatcggcgctttggcatccagcacggtactgcccgccagtccaccgcgaattgcctgataaaccaggtccgggttaacgcccgctttagttgccagcgttaacgcttctgacatcgcggcaatattcagcgccacaatgacctgatttgccagtttggtgacgttacctgcaccgatttccccggtatgcaccacggaacccgccatcgctttcatcaaatcatagtatttgtcgaaaatagccttgtcgccgcctaccatcactgacagcgtaccgtcgatggctttcggttcaccgccgctcaccggagcatccagcatatcaatgcctttcgctttcagcgcttcgctgatttcacggcttgccagcggtgcgatagaactcatatcgatcaataccgtacctggcttcgcgccttcaataatgccattctcacccagcgccacctctttcacatgaggggagtttggcagcatggttatgatgacgtcgcactgttcagcgatcgctttagccgtagaagctgtttctgcacctgcagcaatcacgtcagcaatagcttctgggttacggtcagcaaccaccagcgagtaacctgctttcagaaggtttttactcattggtttacccataatccccaggccaataaaaccaactttcatagtcatatcaatcatctctcttgttgcggtggtggttattttttaaaggtatcagccagtttctgagtggcagagcggaagacgccgagatcgctgccgacagccacaaacgtcgcgccccattccagataacgacgcgcatcggcttcgaccggcgcgaggataccgctgggtttgccgtgcgcgctggcacggttaaaaatgtgctgaattgctttttgtacatccgggtgtgatgcattgccgagatggcctaatgccgcggccagatcgctggggccgacgaagatgccgtctacgccttcggtagcggcaatagcatcgacgttatctacgccctgctgactttctatctggaccagaatagtgatgttcttgttcgactgagcgaaataatccgccacggtgccaaacatattggcgcggtgagaaacggagacgccgcgaatgccttctggcggataacgcgtcgatgccaccgcctgctctgcttcctcttttgtttctacaaaaggaatcaggaagttatagaaaccgatatccagaagacgcttaataattaccggctcgttggtcggcactcgcactactggcgcgctggcgctgcctttcagggccattaactgcggaataaacgttgaaatatcgtttggcgcatgttcgccatccagcaccagccagtcaaacccagccaaaccaagaacttcagtgctaatcgggttagagagtgctgaccagcaaccaatttgtacctgtttcgcagccagtgcggctttgaatttattcgggaaaacatcgttattcatcgcttatacctttgcttatttctgcaattccatacgtttaatgtcgccaactacgaagaggtagcagaccatcgccattagcgctgaacatcccacgaaaaccagtgctgcattgaaggagtgcagttcacttaccaggtagccaatcaccagtggagtgacaatggaggcaacattgccaaagacgttaaagacgccgccgcagaggccaacaatctctttaggcgcggtgtcagaaatcaccggccagcccagcgcaccaaatcctttaccaaagaaagccagcgccatcagcatgaccaccagcgtggtgttgttggtgtagttacataagatgatggtggaagccagcaacattcccagcacaatcggtagcttacgtgccagggtcagggataaaccgcgtttgatcagataatccgagaagacacctcccagcacgccgcccgcaaaaccacacagtgctggaatcgaggcgaccagacccactttcagaatcgacatacctttttcctgcaccagataaatcgggaaccaggtgaggaagaaccaggtgatggtgttgataaaatattgtccgaaaaatacgcccaacatcatgcggttagagagcaattgcttgatgtaatgcagtttgggtccgcttgctgccgcactgcccggctttttgtggtccatatcgaccaccgcgccattttcagagataaacttcagctcttccgcagacatacgtgggtgatctgtcgggttatgaatcaatttgatccacagcgccgtcagcacaaaaccaatcacccccataacggtaaagacgtgctcccagccccaggcgaaagtcagccagccaagcagaggcgaaaagagcgccagcgagaaatattgcgccgagttaaagatggcggaggcagtaccacgttctttcgtcgggaaccaggcggcgacaatacgggcgttcgccgggaatgatggcgcttccgagaagccgagcataaagcgcataaagaacatggagatccctgcccaggccagcgggaacatatcaacaaagccttgcaggaaggtgaatagcgaccagaaaaagaggctgtaggtgtaaacttttttcgagccaaacttatcaagcagccagccgccggggatttgcatcagcaagtaggcccagccaaaagcagaaaagatgtaacccatcgaaaccgcacttaactgcaactcttttgccacttcggtaccagcaatagacagcgttgcacgatcggcgtagttaacggcggtaacaataaaaataatcagtaatattaaatagcgggtntgcacgcctttctttttttcgtcaacggtgtccagaatcattttatttacctcgggtacttatgctgatttttattattatggggaagatgttatttatgagtttcatttatgccgtaacgacaatgaactcgggaattagtataagcagcgcgannnnnnnnatcattgtgcaaatgctaatttaattaatactatttaaatattattttgagcatatgcacataaggttgcgcgctaaagcacagatttgcgctttaccttgccgggcggcattgcaatccctgaaatgattgacattgatcacatttctgcgtttaaactcctgacattcttatttcacccaatgaagtcatttattnnnnnnnnngaccaggtcctcattttaataacctctggctggagaatattgcacaatggccaacatcgaaatcagacaagaaacgccaactgcgttttatataaaagttcacgacacagataatgtggcaattattgttaatgataatggcctgaaagcaggaacgcgttttccggatgggctggaattaattgaacatattccccaggggcataaagtcgcattgctcgacattccggctaatggtgaaattattcgttatggcgaagtgattggttacgccgtgcgtgcaatcccacgcggaagctggatcgacgaatcaatggttgtactgccgaaagcgccgccgttacacacgctgccactggcaaccaaagtcccggaacccttaccgccgctggaaggatacacctttgagggctatcgcaatgccgatggcagcgtgggcaccaaaaacctgctcggcatcnccaccagcgtccactgtgtggcaggcgtggtggactacgtagtaaaaatcattgaacgcgatctgctaccgaaatacccgaacgtcgatggcgtggtggggctgaatcatttgtacggttgtggcgtggcgattaacgcaccggcggcagttgtacctatccgtaccattcacaatatttcgctgaatcctaactttggcggcgaagtaatggtgattggcctgggttgtgaaaagttgcagcctgagcgcctgctgactggaacggatgatgtgcaagctattccagtagaaagcgccagcattgtcagtttgcaggatgaaaagcatgtcggttttcagtccatggtcgaggatattttgcaggtcgccgaacgccatctacaaaaactgaatcaacgtcagcgagaaacctgtccggcttcagaactggttgtcggcatgcagtgcggtggcagcgatgccttttctggcgtaacggcaaacccggcggttgggtatgcgtctgatctactggtgcgctgcggcgcaacggtgatgttctcagaagtcacggaagtgcgtgacgcgatccatctgctgacaccacgcgcagtgaacgaagaggtcggcaaacggctgctggaggagatggagtggcacgataactatctcaatatgggaaaaaccgaccgcagcgccaacccttcgccgggcaacaagaaaggcggtctggcaaatgtagtggagaaagcgctcggctccattgctaaatcgggtaaaagtgcaattgttgaagtgctgtcgcccggtcaacgcccgactaaacgcggattaatttacgccgcgacgccagccagcgattttgtctgtggcacgcaacaggtggcttcgggtatcaccgtgcaagtgtttacgaccggtcgtggtacgccgtacggcctgatggcggtacccgtcattaaaatggcgacccgcaccgagctggcgaaccgctggtttgatttaatggatattaacgcgggcactatcgccaccggcgaagaaaccattgaagaggtgggctggaagttgttccactttattctcgacgtcgccagcgggaagaagaaaaccttctcggatcaatggggactgcataaccagctggcggtgtttaacccagcaccggtgacctgatttcttttggaacgtccctcgcaaaacatggccttagtgccatgtttttattgtttaaagcccccacgtccattaataatgcatttgcattaccttagttcaagcttataatttgagcagaaaacaggctgtaaaaggacagtgaatcatgcccgctaatgctcgctctcacgctgtactgaccactgaatcaaaggtcacgatacgcggacaaacaactatccccgcgccagtgcgtgaggccttaaaactgaagccaggccaggacagcattcattacgaaattctgcctggtgggcaagtatttatgtgccgactgggagatgagcaggaggatcatactatgaatgcatttttgcgttttctggatacagatatccagaacaacccgcaaaaaactcgtccattcaacattcaacaaggaaagaaacttgtcgctggcatggacgtcaacattgatgatgagattggcgacgacgaataatggattttccacaaagggttaatggttgggcgctatatgctcatccctgttttcaggaaacctacgacgctttagttgccgaagtcgagacattaaagggaaaagatcctgaaaattatcagagaaaagctgccacaaagttattggcggtggtccataaagtgattgaggagcatatcacggtcaatccatcatcaccggcattccgtcatggcaagtcgttaggctctgggaaaaataaagactggtcacgggtaaaatttggtgctggtcgctatcgtctcttctttcgttacagtgaaaaagagaaagtcatcattctgggatggatgaacgatgaaaacacgctgcgcacctacggtaaaaaaacagatgcctataccgtattcagcaaaatgttaaaaagaggacatcctcctgccgactgggaaaccctcacccgagagacagaagaaacccattgatggtgttcacaatgcccgccgaacgcattcgtgttgaccagcgggcaccctttctcactccccgaccagaatcacttcaaccccagcctttcgcagcccttccaggctatccgcaggaatgccttcatcaacaatgatcatgtcgatacgttgagtatcaatgatcttatgtaaactggaacgattgaatttactggaatcggtgaccacgatgatccgttccgcaacttcgcacatccggcggtttaaacgggcttcatcttcattatgcgtgctgacgccgcgctccagatcgatcgcatctacaccaagaaacagcatatcgaagtggtaattttgcagcgattgctcagcctgatcgccgtaaaaagattnnnnnnnncggcgcaaatgcccgccggtcatcagcagctcaacgccttccgcttccagcaacgcattagccacgttcataccgttggtcatcgcaattacgtcagtgtgcttgcgcatcagacgagcaatctcaaaagtggtggtcccggaatcgaggatcacccgatgacctggctgaatcaactcaacggcagctttcgcaacgctgcgtttcattgcggtgttcagcgcgcttttatcttccactgatggctcgactgacggcgttgtgctatcgcagatcaacgcgccaccataggcacgcacagcgatcccctgcttttccagaaacgccagatcgttgcggatcgtcacggtagatacgccatacaatgccgacagatcgttaacctgcacactcccttgctgtcgcagacgctgaatgatctgttctcgtcgctcgctggtgcctgtcactcgcttctcacctgaagcgtcggtattactcatagtaagtcctttcgtaaaactttcgtttcatttcgttttgcctattaacgcctttctattaagcaaatgcaagcccaccttgcccattgacgcaagctactctcgtttcagtaactttcattatgtttcttttgtgaatcagatcagaaaactattatctttcgttttatttttatctcaccatgacgcagtatcaactgaaacaaaacgaaagattaatatcgcagtaatctgaactggagaggaaagtgaaacatctgacagaaatggtgagacagcacaaagcgggcaaaacaaatggaatttatgccgtttgttccgcacatccgctggtgctggaggctgcaatccgctacgccagtgcaaaccaaacgccgttactgattgaagcaacctccaatcaggtagaccagttcggcggttataccggaatgacgcccgccgattttcgcggctttgtttgtcagctcgccgactcgttgaatttcccgcaggatgagttgattctgggtggtgaccatctggggccaaaccgctggcaaaacctgccggccgctcangcaatggccaatgccgatgatttgattaaaagctacgttgcggcaggattcaaaaaaatccaccttgattgcagcatgtcctgtcaggacgatccgattcccttaactgatgacatcgtggctgaacgcgccgcccgtctggcgaaagtggcggaagaaacctgtcttgaacactttggcgaagccgatctggagtatgtcattggtaccgaagtgccggtacctggcggcgcgcatgaaaccttaagcgagctggcggtcaccacgccggatgccgcccgcgccacgctggaagcccatcgtcacgcctttgaaaagcaaggtttgaatgccatctggccacgcatcattgccctggtggttcaacccggcgtcgaattcgatcacaccaacgttattgattatcagcccgccaaagcgaccgccttaagccagatggtcgaaagntacgaaacgctgattttcgaagcgcactctaccgattatcaaacgccgcaatcgctgcgccagctggtgattgaccactttgccattctgaaagttggcccggcgctgaccttcgccctgcgtgaagctctgttctctctggcagcgattgaagaagaactggtgccagcaaaagcctgttctggtctgcgtcaggtgctggaaaacgtgatgctcaaccgcccggaatactggcaaagccactaccacggtgacggcaacgcgcgtcgtctggcgcgtggttatagctactcggatcgcgtgcgctattactggccggacagccagattgatgacgctttcgctcatctggtacgtaatctggcggattcaccaattccgctgccgctgatcagccagtatctgccgctgcagtacgtgaaagttcgctccggcgagctgcagccaacgccacgggaactcattatcaaccatattcaggacatcctggcgcagtaccacacagcctgtgaaggccaataagcaaaacaaagaggaacacgntatgccaaatattgttttaagccggattgatgaacgcttgattcacggtcaggtcggcgttcagtgggtcggatttgcgggggcaaatctggtgctggtcgccaacgatgaggttgccgaagatccggtacaacaaaacctgatggaaatggtactggcagaagggatcgccgtacgtttctggacgctgcaaaaagttatcgacaacattcatcgcgccgccgatcgacagaaaatcctgctggtttgtaaaacacccgccgatttcctgacgctggtgaaaggtggcgttccggtgaatcgcattaacgttggcaatatgcactacgccaatggcaagcaacaaatcgccaaaacggtttctgtggatgcgggcgatatcgcagcatttaacgacctgaaagccgctggggtggaatgcttcgttcagggcgtcccgacagagcctgctgtggacctctttaaattactttgagggattcatcatggaaatcagtctgttgcaggcattcgcgttgggcattatcgcctttatcgctggcctggatatgtttaacggcttaacccatatgcaccgcccagtggtcctcggcccgttagtcnggctggtacttggcgatctgcataccggtattttaaccggcggtacgctggaactggtgtggatggggctggccccgctggcgggcgcacanccgcctaatgtgattatcggtactatcgtcggcacggcgtttgccattactactggcgtgaaacccgatgtcgcagtcggtgtcgccgtacctttcgctgtcgcagtacagatggggattaccttcctgttctcggtgatgtctggcgtgatgtctcgctgcgaccggatggcggagaacgccgatactcgcggcattgaacgcgtaaactatctggcactgctggcactcggcactttctattttctctgcgctttcctgcctatctacttcggcgcggaacatgcaaaaaccatcattgatgtcctgccgcaacgattaatcgacggcctcggcatcgcgggcggcatcatgccagcaatcggttttgccgtgctgctgaaaatcatgatgaaaaacgtctacatcccctacttcatcctgggctttgttgccgcagcctggctcaagttaccggtgctggctattgctgccgccgcgctggcgatggcgctgatcgatctgctgcgtaaatctcctgaaccgactcaacctgcggcacagaaagaggaatttgaagatggcatctaatcaaaccaccctgccgaacgtcagtgaaaacgaagaaacattgctgactggcgtcaatgaaaacgtgtatgaagatcagagcattggcgcggagctgacgaaaaaagatatcaatcgcgtcgcctggcgttccatgctgttacaagcgtcttttaactacgaacgtatgcaggcttccggctggttgtacggtctgctgcctgctctgaaaaagatccacactaataaacgcgacctggcgcgcgccatgaaggggcatatgggtttcttcaatacccatccgtttctggtgacatttgttatcggcattatccttgcgatggagcgttctaagcaggacgttaacagtattcagagcaccaaaattgccgtcggtgcnccgctcggcgggattggcgatgcaatgttctggctaacgctactgccgatttgtggcgggattggagccagtctggcattgcaaggctccattcttggcgcagtcgtctttattgtgctgttcaacgtggtccacctggggctgcgttttggtctggcgcattatgcttaccgcatgggcgtggcggcgattccactcattaaagctaataccaaaaaagtcggccatgctgcgtctatcgttgggatgacggtaatcggtgcgctggtggcaacctatgttcgtttaagcaccacgctggaaatcacagcgggcgacgcagtggttaagttacaggctgatgttatcgacaaactgatgcctgccttcttaccgttggtctacaccctgaccatgttttggttggtacgccgcggctggagtccgctgcgtctgattgcagttaccgtggttctcggcatcgttggtaaattctgccatttcctttaaatacaatgaggtattagatgttaagtattattttgacagggcatggcgggtttgccagcggcatggaaaaagcaatgaagcaaattctcggtgagcaatcgcagtttatcgccatcgattttccggaaacctcaagcaccgcgctgcttacatcgcagcttgaagaggccatcgcccaactggattgtgaagacggcattgtttttctgacggatttgctgggcggcacgccgtttcgcgtagcttcaacgctggcgatgcaaaaaccgggctgtgaagtgatcaccggcaccaatttgcaactgctactggagatggtgctggagcgcgaagggttaagcggtgaagaattccgtgtacaggcgctggagtgtggacatcgtgggctgaccagtctggtggacgagttaggccgctgccatgaagaatgtccggtcgaggaagggatatgacacacgttctgcgcgccagaaggctgctgactgaagagggatggctcgatgaccatcagttgcgtattgctgacggtgtcatcgcagcaatcgaaccgattccagtgagcgtgactgaacgcgatgcggaactgctctgccccgcttacatcgacacccatgtacacggtggtgcgggcgttgatgtaatggatgacgcgccggatgtactcgacaagctggcaatgcacaaggcacgcgaaggtgtcggcagttggttgccgactaccgtaaccgcgccgcttagtaccattcatgcggcgctgaaacgtattgctcaacgttgccaacgcggcggacctggtgcgcaagtgctggggagttatctcgaaggaccgtacttcacgccgcagaataaaggcgcgcatccgccggagttgtttcgcgagcttgaaattgccgagctggatcaattgattgccgtttctcagcacaccttacgcgtggtagcgctggcaccggaaaaagagggggcattgcaggccatccgccatcttaaacagcaaaatgtacgagtgatgctggggcatagcgcggcgacctggcaacaaactcgcgccgcgtttgatgctggtgccgacggcctggtgcattgctataacgggatgacaggtttacatcaccgcgaaccgggaatggttggcgcgggattaacggacaagcgcgcctggctggaactgatagccgatggtcatcatgtgcatccggcggcaatgtcnctgtgttgttgctgtgcgaaagagagaatcgtactgatcaccgacgcgatgcaggcagccgggatgccggatggtcgctatacgttatgtggcgaagaagtgcagatgcacggtggcgttgtccgtaccgcgtccggtgggctggcgggcagtacgctgtctgttgatgcggcagtgcgcaacatggtcgagttgacgggcgtaacgcctgcggaagccattcatatggcgtcgctgcatccggcgcgaatgctgggtgttgatggtgttctgggatcgcttaaaccgggcaaacgcgccagcgtcgttgcgctggatagcgggctgcatgtgcaacaaatctggattcagggtcaattagcttcgttttgatggtttgctccattattgggccttcacttcccccgtaaggcctttctttttctttcgttttgatctgtgcagcggtgtcggatgcgacgctaacgcgtcttatccgacctacagttggtgaccgcaaggccggataaagcgtttgcgccgcatccagcaatcccttttgcttcctttatcttttctttcaacgatcacggatttcgttttatttcctttttctccattgaactttcggtttcttttctatagattttaatcaacgaaagacatcaccaagtgaaatgaaacgaaaggcaagtgaaagcgacaacgcccgacgtcaagttcatcagactaaggattgagttatgccagaaaattacacccctgctgccgccgcaaccggtacatggactgaagaagagatccgccatcagcctcgcgcatggatccgttcgctcaccaacatcgacgcgctacattccgcgcttaataacttccttgaaccgttactgcgcaaagagaatctgcggatcatcctgaccggagccggaacctcggcatttatcggtgacatcatcgcgccgtggctcgccagccataccggtaaaaacttcagcgccgtaccgaccaccgatctggtcactaatccgatggactacctgaacccagcccatccgctgctgttgatctccttcggtcgatccggcaacagcccggaaagcgtcgcagccgtggaactggcaaatcaatttgtaccggaatgctatcacctgccgatcacctgcaacgaagcgggcgctctttaccaaaacgcgatcaacagcgataacgcgtttgccgtgctgatgcccgcagaaacgcacgatcgcggctttgcgatgaccagcagcattaccaccatgatggccagctgcctcgcggttttcgcacctgagacgatcaacagccaaaccttccgcgacgtggcggatcgttgccaggcgatcctgacctcactgggcgatttcagcgaaggtgtgtttggttacgcaccgtggaaacggatcgtttatctcggcagcggtggcttacagggcgcagcacgcgagtcggcgctgaaagtgctggaactgacggcgggtaaactggcggccttttatgattctccaaccggattccgtcatggaccaaaatcgctggtcgataacgaaacactggtggtggtatttgtctccagccacccttacacccgtcagtatgatcttgatctgctggctgaacttcaccgtgacaaccaggcaatgcgtgtaatcgccatcgccgcggaaagcagcgacatcgtcgctgccggtccacatatcatcctgccaccgtcacgtcactttatcgacgttgagcaggcattttgcttcctgatgtacgcccagacgtttgcactgatgcagtcgctgcacatgggcaatacgccggataccccatcagccagtggcaccgttaaccgcgtggtgcaaggcgtaatcattcatccgtggcaggcataagaggatcgcattatgagcattatctccaccaaatatctgttacaggacgcccaggccaatggctacgcggtgcctgcttttaacattcataacgccgagacgatccaggcgatcctcgaagtgtgcagtgaaatgcgatcgccggtgatcctcgccggaacgccggggacctttaaacatatcgcgctggaagagatctacgccctgtgcagcgcctattccacaacctacaacatgccactggcgctgcatctcgaccaccacgaatcgctggatgatattcgccgtaaagtccacgcaggtgtgcgcagtgcgatgatcgacggcagccacttcccgtttgccgagaacgtaaagctggtgaaatcggttgtcgacttctgccactcccaggattgcagcgtggaagcagaactgggccgcctgggcggtgttgaagatgacatgagcgttgacgccgaaagtgcattcctgaccgatccacaagaagctaaacgctttgtcgaactgactggcgtcgacagcctggcggtagcgattggtacggcgcacggcttatacagcaaaacgccgaagattgatttccagcggctggcggaaattcgtgaagtggtggatgttcctctggtgctacatggtgccagcgatgttccggatgaatttgtccgtcgcactattgaacttggcgtcacaaaagtgaacgttgccacagaattaaaaatagccttcgccggcgcggttaaagcctggtttgcggaaaatccgcagggtaatgatcctcgttattatatgcgcgtcggaatggatgcgatgaaagaagttgtcagaaataaaattaatgtctgtggttcagcgaatcgaatttcagcataatcattagttttttatgatttatcccaatgtacttcccgattaatatcggggagtgccttaatggaaaaggagatgactaaaccttaataaatagatcagtacaatatcgcaacaataatatatttaaaaaaattatattattcaactttatggtgaggattacacaatgagcagtccaaatattctcttaacccgtattgataaccgtctggttcacggtcaggttggcgtgacctggacatccaccatcggtgcgaatctgctggtagtcgtggatgatgttgtcgctaacgatgatattcaacagaaattaatgggtattaccgcagaaacctacggctttggcattcgtttctttactatcgaaaaaaccattaacgtcatcggcaaagctgcaccgcatcagaagatcttcctgatttgccgtacgccacaaacggtacgtaaattggtagaaggtggcattgacctgaaagatgtcaacgtcggcaatatgcatttctcggaagggaaaaagcaaatcagcagtaaagtttatgtcgatgaccaggatctcacggacttacgttttattaaacaacgtggcgtgaatgttttcattcaggacgtccctggcgatcaaaaagaacaaatccctgactaaatctaaaatcgccttaatattggtttgaggtaataaaaatgcatgaaataaccctacttcagggattatccctggcggcgttagttttcgttctggggattgatttttggctggaagccttatttttattccgcccgataatcgtttgtaccctaactggcgctattctcggtgatattcagactggcttaattaccggtggtctgacagagttggctttcgccggattaacccctgcaggtggtgttcagccgcccaacccgattatggcgggtctgatgaccaccgtcattgcatggtctacgggcgttgatgccaaaacggcaattggtcttggcctgccgtttagtttgttaatgcagtacgtcattctgttcttctattctgctttctcattatttatgaccaaagccgataaatgcgcgaaagaggcggatacggcagcgttttcccgacttaactggacaacgatgctcatcgtcgcttcagcgtatgcggtgattgctttcctctgtacttacctggcacaaggggcgatgcaggcgctggtgaaagcgatgcccgcttggctgacccacggctttgaagtggctggcggtattctgcctgccgttggttttggcttgctgctgcgcgtgatgttcaaagcacaatatatcccttacctgatcgccggcttcctgtttgtttgctacatccaggtcagcaacctgttgccggttgccgtactgggcgcaggctttgcggtgtatgagtttttcaatgcgaaatcccggcagcaagcgcaaccgcagcccgttgccagtaaaaatgaagaagaggactacagcaatgggatctgaaatcagtaaaaaagatatcacccgtctgggctttcgttcgtcgctgctgcaagcgagctttaactacgaaaggatgcaagcgggcggttttacctgggcgatgttgccgatcctgaaaaagatttataaggatgacaaaccgggcctaagcgcagcgatgaaagataacctcgaatttattaatatccacccgaatctggtcggattcctgatggggttattaatttcgatggaagaaaaaggagaaaaccgcgacaccattaaaggcctcaaagtggcactgtttggcccaatcgccgggattggcgatgcgattttctggtttactttgttgccgattatggcgggaatttgctcatcatttgccagccagggaaacctgctggggccgattctatttttcgccgtttacctgcttatctttttcctgcgcgtcggctggacccacgtcggttattcagtcggcgtgaaggcgatcgataaagtgcgagagaactcgcagatgattgctcgctcggcaaccatcctcgggatcacggtaatcggcgggctgatcgcttcgtatgtgcatattaacgtggtgacatcgtttgccatcgacagtacccacagcgtcgcgctgcaacaggatttcttcgataaagtcttcccgaacattttaccgatggcctacaccctgctgatgtattacttcctgcgggtgaaaaaagcgcatccggtgctgttaatcggcgtgacttttgtgctctctattgtttgttccgcattcggcattttgtaaatggaacgangcactgcgtctggcggtgcctctttacttaaggaatttcatcctgtgcaaacccttcagcaagttgaaaactatacggcgttaagtgaacgtgccagcgaatatttattggccgtgatccgtagcaaaccggatgccgtgatttgcctggcgaccggagccacgccattactgacgtatcattatctggtagaaaaaatccactagcagcaggttgatgtcagccagctcacnttcgtgaagctcgacgaatgggtggatctgccattaacgatgcctggtacctgcgaaactttcctgcaacagcatatcgtgcagccgctggggctacgtgaagaccagctcatcagctttcgctccgaagagataaatgagacagagtgcgaacgggtaacgaacctgattgcgcgcaaaggcggtctggatttatgcgttctcggattggggaaaaacggtcatcttgggctgaacgaaccgggagaaaacctgcaaccggcctgccatatcagtcaacttgatgccagaacacagcaacatgagatgttaaaaaccgcgggtcgccccgtgactcgtgggatcaccttaggcctgaaggatattctcaatgcccgcgaggttttgttactggtgactggcgaaggaaagcaggatgcgacagaacgttttctcacggctaaagtctctacctctatcccggcttcgtttttgtggctgcacagtaactttatttgtttaattaatacctaaccagatgaaaaatttgctcaaaatgtttaaattaacttatgcaacagtcacgcattatattaaataacatttgactgggttgaacataacgccaatagcaaaaggagttatgttcaacaatttaattttagatatacatataacttgttctattaataaaccatctcgtattctgactcgccccctggcgcagcaaagtcatgcacttatactcttttgaatacatagaaaattgatatcaatataatgaanntannannnnnntgcatataaatataatcttaaagtttagtctatttaatgttcaatgaaatattnnnnnnnnnnnnnnnnnnnnagatgttgaacatatattcacattaaatatgattatgtacttgttacaaggataaggttataaatgaataaagttacaaaaacagctattgcgggcttacttgcgcttttcgcaggtaatgccgctgcaaccgatggtgaaatagtttttgatggcgagattttaaaatccgcttgtgaaatcaatgactctgataagaaaattgaagttgctcttggtcactataatgccgaacagtttcgttctgtaggcgatcgtagcccaaaaattccattcactattcctttagttaactgcccagtgactgggtgggagcacgataacggcaacgttgaagcgtctttccgtttatggctggaaacgcgggataatggtaccgtccctaacttccctaacttggcaaaagtgggctcttttgctggcacagcagcaacaggtgtgggtatccgtattgacgatgcggaaagcggaaaccttatgccactaaatgctatgggcaatgataacacagtttatcagatccctgcggactccgctggaattgtcaatgttgacctcatcgcttactacgtatcaaccgttgaagcatccgaaatcaccccaggggaagcagacgctgtcgttaacgtaacgctggattaccgttaatacgttacggcgttatctgacctttcagataacgcccttttccttcctatttctcgttgtatcaggttgaaaaataactatgtcaaaacgaacattcgcgatgatatttaccttgttgtgtagcttctgtatcggccaggcgcttgcagggggtatcgttttacagcgaacgcgagtgatctatgatgccagccgcaaagaggctgcgttacctgtcgcaaacaaaggcgcagaaacaccttatttactgcaatcatgggtagataatatagatggtacaagccgtgccccatttattataaccccaccgctaattcgtcttgaagctggcgatgattcatcactgcgaattattaaaacagctgataacctgcctgaaaataaagagtcgctgttctacattaatgttcgtgccattccagcaaagaaaaaatcagatgatgttaatgctaacgagttgacgctggtatttaaaacacggatcaaaatgttttatcgccccgcacacctgaagggacgggtaagcgatgcgtggaaatcactggaatttaaacgtagtgatcattcactcaatatatataacccaactgaatattacgtcgtatttgccggactagcagtcgataaagccgatctcacaagcaaaattgaatatatcgcgcccggagaacataaacagttaccacttccagcatctggcggaaagaacgtgaaatgggctgcgatcaatgattatggcggcagttccgggacagaaactcgtccactgcaataacaaatataaaaacacaggtcatcagggaatgccacaacgacaccaccagggacataaacgcacaccgaaacagttggcgctcattatcaaacgctgtttgccgatggtgctcactggcagcggcatgctttgcactaccgctaacgccgaagagtattatttcgaccccattatgctggaaaccacaaaaagtggtatgcaaacaaccgatctgtcacgtttttcaaaaaaatacgcacaactaccaggaacttatcaggttgatatctggctgaataaaaagaaggtttcacagaaaaaaattacatttaccgccaatgcagagcaacttctgcagccacagtttacggtagaacaactacgtgagctgggtattaaggtggatgaaatcccggcgctggctgaaaaagatgacgatagcgtgatcaactcgcttgaacaaatcattcccggtacagctgctgaatttgatttcaatcatcagcgacttaatttgagcattccccaaattgcactgtaccgtgatgcaagaggttacgtctccccttctcgttgggacgatggtataccaacgctgtttaccaactactcgtttacaggttctgataaccgttaccgccagggcaatcgtagccaacgacagtacctaaatatgcaaaatggtgccaattttggcccctggcgattacgtaactattctacgtggacacgcaacgatcaggcgtcaagctggaacactatcagtagttatttacaacgtgatatcaaggcgttgaagtctcagttgcttctgggagaaagcgccaccagcggcagtattttttccagctacaactttactggcgtgcaactcgcttccgacgataatatgttgccaaacagccagcgcggatttgccccaacggtacgcggtatcgcaaacagtagtgcaatcgtgactatcaggcaaaatggttatgtgatctatcaaagcaacgtgccagcgggtgcctttgaaattaacgatctctacccctcttccaacagcggcgatttagaagtcacgattgaagaaagtgacggtacgcaacgtcgctttatccagccttattcttcattacccatgatgcagcgacctgggcatctaaaatatagcgcgaccgctggacgctatcgcgctgatgcaaacagtgatagcaaggaacccgaatttgctgaagccacggcaatatatggtttgaataatacttttacgctgtatggcggcctgctcggttctgaagattattatgcgctggggatcggtatcggcggcacacttggcgcactgggcgcgttgtcgatggatatcaacagagctgacacccaattcgataaccagcactcttttcatggctatcaatggcgtacgcagtacatcaaagatatcccggaaaccaacaccaatatcgctgtcagctactatcgctataccaacgatggctattttagttttgatgaagccaatacccgcaattgggactataacagtcgccaaaaaagtgaaattcaattcaacatcagccagacaatatttgatggggtaagtctgtatgcctccggttcacagcaagactattggggcaataacgagaaaaacaggaatatctctgttggggtttccggccagcaatggggaattggttacagcctgaattatcaatacagccgctacactgatcaaaataatgaccgcgcactctctttgaatctcagtattccgttagaacgctggttaccgcgtagccgggtttcctatcagatgaccagccagaaagatcgcccaacccaacatgaaatgcgtcttgatggctcactgctggatgatggtcgcctgagctatagtctggaacaaagtctggatgacgataacaaccataacagtagcgtgaacgccagttaccgttcaccttatggaaccttcagtgccggatacagttacggtaatgacagtagccaatacaattacggcgttaccggcggcgtggttatccatcctcatggtgtgacgctctcgcaatatctgggcaacgcttttgcgcttattgatgctaacggggcatctggcgtgaggatacaaaactatccggggattgctactgatccctttggctatgcagtggttccttatctcacaacttatcaggaaaaccgtctctcggtagatactacgcagctgcccgataacgtcgatcttgaacaaacaacacagtttgtggtgcccaacagaggtgcaatggtagcggcgcgtttcaacgccaatatcggttatcgcgtacttgttacagtcagcgatcgcaacggtaaaccgttgccctttggcgctcttgccagcaacgatgatacggggcaacaaagtatcgtcgatgagggcggcatactatatctctctgggatatcgagtaaatcacaaagctggactgtacgctggggaaatcaggcagatcaacaatgtcagtttgcttttagtacaccggattcagaaccaacaacctctgtattacaaggcacagcgcagtgccattaaggataaaaaaatgaaaagagcgcctcttataacaggacttttgttgatatccacatcctgcgcttatgcctcctcaggagggtgtggagctgacagcactagcggtgcgacaaattacagcagtgtggttgatgatgttacggtgaaccagacagataacgtgacaggacgggagtttacctctgcaacgctaagtagcactaactggcaatacgcctgttcctgctctgcgggtaaggcagttaaacttgtctatatggtcagccccgtacttaccaccactggacatcagacaggatattacaaactcaatgacagcctggatattaaaaccacattacaggcaaacgacattccaggactcacaaccgactaggttgtctctgttaacacccgattcacacagataaaaagcagcaccgtatattctgctgcaacccaaacgggtgtttgccagggtgacacgtctcgttatggacccgttaatattggtgcaaataccacctttaccctgtatgtcaccaagccatttctcggctcgatgaccattccgaaaacggatattgccgtcattaaaggcgcgtgggtcgatggaatgggaagcccgtctacaggtgacttccatgatttagtcaagttatcgattcagggaaatctcaccgccccacagtcgtgcaaaattaatcagggcgatgttattaaggttaattttggattcatcaatggtcagaagtttaccacccgcaatgccatgccagacggttttactccagtagactttgatatcacttatgactgtggtgatacttcaaagattaaaaactcgttgcaaatgcgcatcgacggtacaactggggtagtagaccagtacaacctggtcgccagacgaagaagttcagacaatgcgcccgatgtcggtattcgtattgaaaatctcggcggcggagttgcaaatattccttttcagaacggtatccttcccgttgatccttccgggcatggcaccgtcaatatgcgcgcctggccagttaatctggtcggtggtgagctggaaacaggaaaatttcagggcacagccaccattaccgtcatcgtgcggtaaaagaagacgttgcgttttgattaacgcaacgcttcggcactcttacccctgctgctccagcgcatacttatacagcgcatttttcttcacgccgtgaatttctgcggccagcgccgccgcttttttcagcggcagttctgcctgtagcagcgccagcgtgcgcagggcatcggcgggtaagtcttcttcctgtgctttatgaccttcgacaatcagcaccatttcgcctttgcgacggttttcatcttcctttacccacgccagcagctcgccaacgggcgngccgtgaatggtttcccaggttttggtcagctcacgcgccagaaccacgtagcgggattcgcctaataccgcaacgatatcttccaggctatctaacagacggtgggtagattcataaaaaatcagcgtgcgcggctccgcttcaatggcttttagcgcatcacggcggccttttgatttggcaggtaaaaagccttcgtaacagaaacggtcagagggtaaacccgnggcgcttaacgcagtgatagcagcacacggtccgggtagcggcaccacacgaatccccgcttcacggcaggtacgcaccagatggtagccaggatcgttaattagcggcgttccggcatcggaaaccagcgcaatgttttgcccctcttgcagcttcgccagcagcgtttcggctttttgttgttcgttatggtcgtgcagcgcaaacaaccgggcattaatcccaaaatgttgcagcaataaaccggtgtgacgagtatcctcggcggcaatcagatcaacggcctgtaatacctctaacgcacgctgggtgatatccgccagattgccgattggcgtcggtacaatgtaaagctggccctgagaattatccgccgattggtgttgtttcattgtgtcgtccgtattgccgatttaatattgagcattgcgtaaaaaaaatatcactggatacattatggtaccctcaacattttctcgtttgaaagccgcgcgttgtctgcctgttgttctggcagccctgattttcgtcggttgtggcacccatactcccgatcagtccactgcttatatgcagggcacggcgcaggctgattctgccttttatcttcagcagatgcagcaaagctctgatgataccaggatcaactggcaattactcgccattcgtgcactggtgaaagaaggtaaaaccgggcaggcggttgagttgtttaaccaactaccgcaagaactgaacgattctcagcgtcgcgagaaaacactgctggcggtagagattaaactggcgcagaaagattttgctggcgcgcaaaacttgctggcgaaaattacacccgccgatttagaacaaaaccagcaagcccgttactggcaggcaaaaatcgatgccagccaggggcgtccttccattgatttactgcgcgcgttaattgctcaggaaccgctgcttggcgcgaaagaaaaacagcagaatattgatgccacctggcaggcgctctcctccatgactcaggaacaggcgaatacgctggtgatcaacgccgacgaaaatattctgcaaggctggctggatctgcagcgcgtctggtttgataaccgtaacgatcccgacatgatgaaagccgggatcgccgactggcagaaacgttatccgaacaatccgggcgcgaaaatgctgccaacgcagttggttaacgtaaaagcgtttaaaccagcctcgaccaacaaaatcgccctgctgttgccactgaatggccaggcagcggtatttggtcgcactattcagcaaggctttgaagcggcgaaaaatatcggcactcagccagtggcggctcaggtagctgccgcacctgccgcagacgtagcagaacaacctcagccgcaaactgcggatggcgttgccagcccggcacaagcctcggttagcgatctgaccggtgatcagcctgcggcccagccggtgcctgtaagcgccccggcgacaagcaccgcagcggtaagcgcacccgcaaatccatccgcagagctgaaaatctacgatacctcatcacaaccacttagccagatcttaagccaggttcagcaggatggcgcgagtattgtggttggtccgttgctgaaaaataacgttgaagagttgctgaagagcaacactccgctgaacgtactagcactgaaccagccggagaatatcgaaaatcgcgtcaatatttgttacttcgcgctttcaccggaagacgaagcgcgcgatgcagcgcgtcatattcgtgaccagggtaaacaagcgccgctggtgctgatcccacgcagttcattgggcgatcgcgtagccaatgcgtttgcgcaagagtggcagaaattgggcggcggcaccgttctgcaacaaaaatttggttccaccagcgaattacgcgcgggtgttaacggcggttctggtattgctttaacgggtaccccgattactcccagagcgacaaccgactccggcatgacgaccaacaatccaacgctgcaaaccacgccaaccgatgaccagttcaccaataatggcggtcgtgtcgatgcggtgtacattgtggcaacgccgggtgaaatcgcttttattaaaccgatgatcgccatgcgtaacggtagccagagcggtgcaacgctgtacgccagctcccgcagtgcgcaagggaccgctggcccggatttccgtctggagatggaaggcttgcagtacagcgaaatcccgatgctggcgggcggtaatctgccgttaatgcagcaggcactcagcgcggtgaataacgattattcactggctcgcatgtatgcgatgggcgtcgatgcctggtcgctggcaaatcatttctcacaaatgcgccaggttcagggttttgaaatcaacggtaataccggaagcctgacggctaacccggattgcgtgattaacaggaagttatcatggctacagtaccaacaaggtcaggtagtccccgccagttaaccaccaaacagaccggcgatgcgtgggaagtacaagcgcgtcgctggctggaaggcaaaggactgcgatttgtcgccgctaacgtgaacgagcgtggcggcgagatcgatctgataatgcgtgaaggccggaccaccgtttttgtcgaggtgcgttaccgccgttctgcgctntatggcggcgcggcagccagtgtgacccgcagcaaacaacacaaattattacagactgcccgcttgtggctcgcgcgtcataatgggagttttgatactgtggattgccggttcgatgtggtagccttcaccgggaatgaggttgagtggattaaggatacctttaatgaccactcataattaaggtttaaggattagcgtgcaagaaagaattaaagcttgcttcactgaaagcattcaaactcaaattgcggcggcagaggcgcttccggatgccatctcccgtgcggccatgacgctggttcagtctctgctcaatggcaacaaaatcctctgttgtggtaatggaacttccgctgccaatgcacagcattttgctgccagcatgatcaaccgtttcgaaacggagcggcccagcttacctgccattgcactaaataccgataatgttgtcttaacggcgattgccaacgatcgcttacatgatgaagtgtatgcaaaacaggtgcgggcgctggggcatgcgggagatgtattgttagccatttccacccgtggcaacagccgcgatatcgtaaaagcagtagaagctgccgttacgcgtgatatgaccattgtggcattgaccggttatgacggcggtgaacttgcaggtttgttagggccacaggatgtggagatccgcatcccttcgcatcgcagtgctcgcattcaggaaatgcatatgctgacggtaaattgcctgtgcgatctgatcgataacacgcttttccctcaccaggatgattaaggagaatacatgaaggcattatcgccaatcgcagtccttatttccgcgctgctgttgcaaggttgtgttgccgctgccgtagtgggtactgctgctgtgggtaccaaagccgcaactgacccacgcagtgtcggcacccaggtggacgatggtaccctggaagtgcgcgtgaacagcgcattgtcgaaagacgaacagattaagaaagaagcgcgcattaatgtaacggcctatcagggcaaagtgctgctggttgggcagtcaccaaacgctgaactttcggctcgcgccaaacagattgctatgggcgtagacggtgccaacgaagtgtataacgagattcgtcagggccagccgattggtctgggcgaagcgtctaacgatacgtggatcaccaccaaagtgcgttcgcagctcttaaccagcgacctggtgaaatcgtccaacgtgaaagtgaccaccgaaaacggtgaagtgttcctgatggggctggtgactgaacgtgaagcgaaagcggcggcagatattgccagccgggtgagcggcgtgaagcgggtaactacggcgtttacgtttattaaatagcagccccttgtaatgcctgatgcgacgcttgccgcgtcttatcaggcctacaacgatgcaaaccgtaggtcggataaggcgtttacgccgcatccgacatgttttccctcaaatcagaataacagcgccagcccgccgacaatcacgcctgacactgccaccatcgcccccgtcagccataaggctttcgccgggaacgctttgcgcagcataatcagtgacggcaaactcaccgccgggagcgtcatcaacaatgccagcgccggagcagttcccatacctgccagcatcatcgtttgtacaatcggaatttctgctgccgtgggaatgacaaacaagcaccctgctaccgccatcgccaccacccacatcaggctgttatcgacagcaccatcggcatgggggaataaccagacgcgagcggcacccaacaccagtactgcaaggatgtaaaccgggatcgtactccagaaaagcgtccatagcgccctgccccagcgactaaaaaatccgccctgtgcttccggtatgtcaatttcgaccggtgcttgcgtttgcggtgtttcacgcacccatttttgcaccagcgtcgcaatcagcaacaccatcaccagcccggccaccagacgaatcgccgcaaaaccccagccgaggacaaaccccatnaacaccagcgtcgccgggtttaacaccggnttgcccatccagaatgccagcgcaccgcccatcgacacctgttggcgacgcattcccgccgcgaccggagccgcacagcaggtacacatcatgcccggcagcgaaaacagcgttcccagcagcgtgccgcgaaagcgcgattgcccaagcgtacgcaacaaccagtcacgcgggatcagcacctgaatcaacgaaccgaggatcacccccagcaccgccgctttccataccgcgaggaaatagatcatcgcgtaatccaacgccgcctgccatggattagcatccgcctgcgcaaggatagatttaccgatactgtgggtttcggcagcagtaaacgctttgccgtagtaaggttgccatttcacataccagagaccggcaatgacaacgagaaagaaaagcgcgggtttccaccactgaatgggcgttgccgcctgagatgaagactgaccagtcatagcattccccaggaataagttatgataattgagcgcgtgaatattacgctcactatcaattcttgggaataattattcagctcttttgcgtaattctgaagagcttaaaatcgtcacaccttcatgctcgggccgcatcgcctctgccagcatgacccgcgccacgtctctcgcatcaatggatttccagttaccgggtaacaaacggaacagcggcgcaaaaagcgtttcgttcatccgctgtttgctacgatcgcccagtaacatcgacgggcgagcaatggtcaatttcggccagttctgggcgattaatgcttcttccatctcccctttgacgcggttatagaaaaacggcgagtgggcattggcacccatagcactgaccaccagcatannnngcgcgcccagtcgccgcccggttaatgcggtatccactaccagcgtgtaatcggcatgaataaacgcctctttgctccccgcttctcgccgcgtggtgccgagacaacaaaacacaatgtcgatgggatcggtgacctgcgccagcgcgtcagtcagttgcggatcatggggattaaataccccgggcatatcgcccaacggacgtcgcgtcggcgcggctatggcgttaactttcggttcgttaatcaacatccgcagcaggtgaccgcccaccagccccgttgcgcctgtaatcagtacctgactcatcttcgctcctttacagaattgtctgccttgcactccacggctcatgcaccaggcttaatagaccatgaggtaattatccccgattgtgggaaattcgcctcatccaatgcaacaacgcggaggaagcatgagtaagaaaattgccgttttaatcactgatgaatttgaggattcagaatttacttcacccgcagacgagttccgtaaagccggacacgaagtgattaccattgaaaaacaagcgggtaaaacggtgaaaggcaaaaaaggagaagccagcgtgaccatcgataaatccatcgatgaagtgacgccagcggagtttgatgccctgttgctaccgggcggtcattcaccggattatctgcgtggcgacaaccgttttgtcacctttacccgtgattttgtgaatagcggcaaacctgttttcgccatctgtcacggtccgcagctgctgatcagcgccgatgtgattcgggggcgcaaactgaccgcggttaaaccgatcattattgatgttaaaaacgcgggcgcggaattttacgatcaggaagtcgtggtcgataaagatcagctggttaccagccggacaccggacgatctgccagcgtttaaccgcgaggcgttacgcctgctcggtgcctgagccgcgtagccaaatcatttttttaccaaagcccagcgtgttgtcggtgaatttgatttcatcgggccggatttcccacaccggggccgacagcattctggcaaccggaaagcgacgattgtacgccttgcgcgcgaggtcgctttcctcaccttccagcctgcggatctcacctttaaactgcacgccgcgaattaacgctaccgttttcggctgaccgtttaccgttccggcaaccgcagcctgcggcccactcatctgcgcgtggcgcgttttttcttccgtcaaaatgtagaaggcgactttctgcacatcaaacagataaaaggcattggcgcaccagagttccccttcctgctgcacacaccaggtgacaacatgttgttttgccagccaacggctgatggcggtgagtgtttccattgctgttctcttttatactgtgggcctgaccttaacatgcgacgcagacgatgacaccctggtttctttacttgatccgtaccgccgacaataagctttataccgggatcaccacggatgtcgaacgccgctatcagcagcaccaaagcggcaaaggggcgaaagcactgcgcgggaaaggagaactgacgctggcgttttctgcgccagtgggcgatcgttcgctggcgttacgggcggaatatcgcgttaagcaactgaccaaacggcaaaaagagcgtctggtagcggaaggcgcagggtttgcagagctgttaagcagtctgcaaaccccggagattaaaagcgattgaaatgctcgtgatactcaaccagaccagttacgccattcaacgcgtcatccgctaaacgatgtacctggaaggcgctttcagtgcccggccagcggcaacgcagatcgtgatgcgccgccagttcaaagccgaaacggctgtatagcgccggatcgcccagagtcaccactgcggcatagccgaactcattaagcgaatcgagtccttcatagaccagttggcgtgccagcccctgtccacggtatttttcatctaccgccagcggtgccatgccgacccattgcaggtcttcgccctgcacatcaaccggactaaatgccacatagccaatgacctgaccttcgtcatctgtngccaccagccccagcgtcagaaagccatcttcacgcagatcgtgaaccagcttcgcttccgcatcactttcgaatgaacgacgcagcagggcatcaatacccggcgcatcaatgggaatttctactcgaattagcatggttcacctaccgatgtctgtttggtttcaggcgcggttttcattcccgcctcaacaaaatccgccagttgcagcagcatcatgcgtaaggctttcggcatttgctccagttcaatggcgtccatcaggtttttcacatacagccccagctccgtatcgccttcaatcaccagccgacgctggaagaagagcgtatccggatcttgtttacgcgccgcaatcatcagcagatcgctggcgtcggcactaaaactcacatcagcttgcgcgttctggctgaccaccagtttgccattcaccaccgaggtaaaccattgcaggtcaatatcacgcacatgaatacttaaccagcggccttcaagaaactccagctcaccatcatccagcgcctggcggaattgccagcttaagacctgctcaagaacctggcgttttagcgcaaatggcgtcagttttaccggtacactcaacagagatggccccaaatgcacaatacgggaacgcagtttatccaacacgagttttactccctgtttcaacaatcatcctattttgccatatcagaaaaataacatagcggtataaatcaacaattccatatgaaattgctgctaccaccaatacaactttaactgccttaaatcaaaaattgtcgcagcaaggttaactaaaatcccagttcgttaacatttttgcgttttgatagcgcaaccttcaggaaaaattatggagctgctctgccctgccggaaatctcccggcgcttaaggcggccatcgaaaacggcgcagatgctgtttatatcgggctaaaagatgataccaatgcccgtcacttcgccggccttaactttaccgagaaaaaattgcaggaagcggtgagttttgtccatcaacatcgccgcaaacttcacatcgcgattaacacttttgcgcatccggacggttacgcccgttggcagcgtgccgtggatatggcggcgcagctgggtgccgacgcgctgatcctcgccgacctcgccatgctagagtacgccgccgagcgttacccgcatattgagcgtcatgtgtcagtgcaggcttcggcgaccaatgaagaggcgattaacttttatcatcgccattttgacgttgctcgcgtggtgctgccgcgcgtgttgtcgattcatcaggtgaaacaactggcacgggtcacacctgtcccgctggaagtctttgctttcggcagcctgtgcattatgtcggaaggtcgttgctatctgtcgtcgtatctgacgggtgagtcgcccaacaccgtgngcgcgtgttctccggcccgtttcgtgcgctggcagcaaacgccgcaggggctggaatcccgcctgaacgaagtgctgatcgaccgttatcaggacggcgaaaacgcaggttatccgacgctatgtaaagggcgttatctggtggacggcgagcgctatcacgcgctggaagaaccaaccagtctcaataccctggaactgctgccggagttaatggcggcgaatattgcttcggtgaaaattgaaggccgccaacgtagcccggcgtatgtcagccaggtggcgaaagtctggcgtcaggctatcgaccgttgtaaggccgatccgcaaaacttcgtaccgcaaagcgcgtggatggagacgctcgggtcgatgtccgaaggcacgcagaccacccttggcgcgtatcaccgtaaatggcagtgagaagagcaatgaaatattccttagggccagtgctgtggtactggccaaaagagacgctggaagatttttatcagcaggccgccaccagcagcgccgacgtgatttatcttggcgaagcggtttgcagcaagcgccgggcaaccaaagttggcgactggctggagatggcaaaatcgctcgccggaagtggtaagcagattgtgctctccacgctggcgctggtgcaggcatcatctgaactgggcgaactgaaacgctatgttgagaacggtgagtttctgattgaagccagcgatctcggcgtggtgaatatgtgcgctgaacgcaaactgccgttcgtcgccggacacgcgctgaactgctataacgcggtgacgctgaaaatattgctcaaacagggcatgatgcgctggtgtatgccggtggagctttcccgcgactggctggtgaatctgcttaatcagtgcgatgagctgggcattcgcaaccagtttgaagttgaagtcctgagctacggtcatctaccgctggcctactccgctcgctgctttaccgcgcgttcggaagaccgcccgaaagatgagtgtgaaacctgctgcattaagtatccgaacgggcgcaacgtgctgtcgcaggaaaaccaacaagtgtttgtactcaatggcattcagaccatgagcggctacgtttacaacctcggtaacgagctggcatccatgcagggcctggttgatgtggtccgcctgtcaccgcagggtactgacactttcgcgatgctcgacgccttccgcgctaatgaaaatggcgntgcaccactgccgttgacggcgaacagcgactgtaacggctactggcggcggctggcaggactggagctgcaagcctaagtaaatagctcactttgttaacaactttaactactctttaatgcagtattaaagattaatcggtaacaaagtgagctgttatgactgataaaaccattgcgttttcgctactcgatctggcccccattcccgaaggttcttcagcgcgagatgcattctcccactctctcgatctcgcccgtctggctgaaaagcgcggctatcatcgctactggctggcagaacaccacaatatgactggcattgccagtgctaccacgtcggtattgattggctatctggcggcgaataccaccacgctgcatctggggtctggcggcgtgatgttgcctaaccactcaccgttggtcattgcagaacagttcggcacgctcaatacactctatccggggcgaatcgatttggggctgggtcgtgctccgggtagtgaccagcgaaccatgatggcgctacgtcgtcatatgagcggggatattgataatttcccccgcgatgtcgcggagctggtggcctggtttgacgcccgcgatcccaatccgcatgtgcgcccggtaccaggctacggcgagcaaatccccgtgtggttgttaggctccagcctttacagcgcncaactggcggcgcagcttggtctgccgtttgcgtttgcctcacacttcgcgccggatatgttgttccaggcgctgcatctttatcgcagcaacttcaaaccgtcggcacgactggaaaaaccatacgcgatggtgtgcatcaatattatcgctgccgacagcaaccgcgacgctgaatttctgtttacctcaatgcagcaagcctttgtgaagctgcgccgtggcgaaaccgggcaactgccgccgccgattcaaaatatggatcagttctggtcaccgtctgagcagtatggcgtgcaacaggcgctgagtatgtcgctggtgggcgataaagcgaaagtgcgtcatggtttgcagtcgatcctgcgcgaaaccgacgccgatgagattatggttaacgggcagattttcgaccaccaggcgcgcctgcattcgtttgagttggcgatggatgttaaggaagagttgttgggatagtgtgtcttaacgcgggaagccttatccgagctggcaacgctgtcccacgtaggcctgataagcgaagcgcatcaggcattgtgtaggcagcagaaatgtcggataaggcccgctgattactgatacaccggcagcaaattaaagctcgataagatatggaccagtgcgttgccaacgccaaataccagaatcagcgtaatcatcggcttgccgccccagacgcggaatttcgggctgccaaagcgtttacgcgatgcgcgggccagcagtgccggaacaattgccgcccagatggtagctgctaaaccagcataaccaatggcgtacaggaatccgttcgggaacagcagaccacccacaacaggaggggcaaaggtcagcaatgccgttttcaagcggcccacagccgagtcgtcgaaaccaaacagatctgccagatagtcaaacaaacccagcgttacgccgaggaacgaactcgctaccgcaaagtttgagaacacaaccagcagcagatccagactacggctgttcagtacgccgcttaacgcctgtaccagcacatcaatattaccgcccttctctgcaatatcgataaactccggacgcgggatgttacccatcgtcgccagcaaccagatggtatacagcgccagcgccatcagcgtaccgtacaccagacatttcacgatggttttcggatctttgccgtaatacttcatcaggcttggcacgttaccgtgataaccaaacgatgccagacagaacggcaaggtcatcaacagatacggtgcataagacgcattgctttcagcgacgttgaacaatgtcgcaggctgcacatgccccagcaggctaccgaaggtgaggaagaaggtaatgactttcgcccccagtacaatcgctgtcatgcgactgacggctttagtgctcaaccacaccacaaacgctaccagcaatgcaaaaccaaaacccgccgcccgtgccgggacgtttagtgacatctctgcgaaggtgtgatgcagaatcgaaccactggcagaaatataggcataggtcaggatatagagcacaaaggcaatggaaatgccgttgaccacgttccagcctttgcccagcaaatctttggtgatggtgtcaaaactcgaaccgattctgtaattcaggttagcttccagaatcatcaagccggaatgcagcatacagaaccaggtaaagatcagcnccgccattgaccagaaaaaccacgccccggacatgaccactggcagagaaaacatccctgcgccaataatggtgccgccgataatcaccacgccgccaagcagcgacggtgacgtttgggtggtggttagtgttgccatgagggcttctctccagtgaaaaatagtgcgactgcgttgttatgtattgcactgtaccagtacgcgagtacaaaagacagaaaaaaagccccgatggttcaaatcggggctgtatatattattttacagactgtgttcgctgttcagcgatgattacgcatcaccnccgaaacgacgacgaccggtagagtcatcacgacgcggagcgcggccttcacgacgttcgccgctaaaacgacgaccatcaccacgaccaccttcacggcgttcaccgctgaagttacgaccaccttcacgacgctcgccactgaaaccacgaccaccgccacgacgctctccgccagtatgcggctgtgcatcgcccagtaattgcatattcatcggcttgttcagaatgcgagtacgtgtaaagtgttgcagcacttcacccggcatacctttcggcagttcgatggtggagtgagaagcaaacagcttaatgttaccgatgtaacggctgctgatgtcgccttcgttagcaatcgcaccaacgatatgacgaacttcaacaccatcatcgcggcccacttcaatacggtacaactgcatgtcaccaacatcacgacgttcacgacgcggacgatcttcacggtcgccacgcggaccacggtcgttacgatcgcgcggaccacggtcatcacggtcacggaattcacgtttcggacgcatcggcgcatctggcggaacaatcagagtacgttcaccctgtgccattttcagcagtgcggcggccagagtttcgagatccagctcttcaccttctgcagtcggctgaattttgctcagcagtgcgcggtattgatccagatcgctgctttccagctgctgctgtactttagcggcgaatttttccagacggcgtttgcccagcagttctgcgttcggcagttctacttccggaatagtcagcttcatagtacgttcaatgttgcgcagcagacgacgctcgcggttctcaacgaacagcagcgcgcggccagcacgacccgcacgaccggtacgaccgatacggtgaacgtaagactcagaatccatcgggatatcgtagttaaccaccaggctgatacgctcaacgtccaggccacgggctgcaacgtcggtcgcaatcaggatgtccagacgaccatctttcaggcgttccagtgtctgctcacgcagcgcctggttcatgtcaccgttcagcgcggcgctgttgtagccgttacgctcaagagcttcagccacttccagagtcgcatttttggtacgaacgaagataatcgccncatcaaaatcttccgcttccaggaaacgtaccagtgcttcgtttttacgcataccccagacagtccaatagctctggctgatgtcaggacgggtagccacgctggactgaatgcgcacttcctgcggctctttcataaagcggcgggtaatgcgacgaatcgcttccggcatggttgcagagaacagagcggtctgatgaccttccgggatctgcgccataatagtttcaacgtcttcgatgaagcccatgcgcagcatttcgtcagcttcatccagaaccagaccgctcagtttagagaggtccagagtgccacgtttcaggtggtccagcagacggcccggagtaccgacaacgatctgcggcccctgacgcagggcgcgtaattgcacgtcataacgctggccgccgtacagggcaaccacatttacgccgcgcatgtgtttagagaaatccgtcattgcttcagcaacctgtaccgccagttcgcgggtcggtgctagcaccagaatctgtggtgctttcagctcaggatcaagattttgcagcagaggtaaagagaatgctgcagtttttccgctccccgtctgggccatacccagtacgtcgcggccattcagcagatgtggaatacactccgcctgaattggagatggtttttcgtaacccagatcgttaagggcttcaaggataggagccttcaggcccagatctgcaaaagtggtttcgaattcagccatgtagtacgtgtgcctcaaaattaatggcggccagtctacataactcatcatgaaattgatcagcaattttcattgaaaagtgtgaaccggctcaaagtaggtgtattaacgaacaacaacgccctcacccgttaaggtgatggcaatcaaaaaagattacgggctgatgtgtacgtcagctattgctggtccgattctgccaggtcatcttggtcctggcccaggagcgataattccaacaatgcgtatcggtgctcaacaaagttatgaacgttgttggcaaccgccagtttgaacagtgccgtggcgctgtccaaatcccccagacttaggtagtacttacctaaatagaagttggtttcactgagatgctcagcgagcgaggtgttatccgttgcgtccgccttgagcctttccattaacgtttgttcgctaatgttgcccaggtagaactcgacaatgttccatccccactgttccttatccgatttttcgaagtgctgtttcaacacttctttagcctgcttctcatcgagcttctgctcggcgagataaagccacagactacggaaaggatcattgggatcgtcttgataaaacgccagcagatcatcttgcgctaacttgtcacgaccgccgtaatataatgcgatcccgcgattcaagtgcgcgtagttgtaagttggatcaagctcaagtacagaatcaaacgcttcataggcagcatcaaaattgcctgcctgcgttaaatatatgcctaagtaattgaatacttcaggcatatccggtcggattgccagcgcttgcgaaaaatcgttacgcgctaatgccctcagaccgagactatcatacaacactccgcgctcatataaaagctgtgcgcgttcgtcatcggttaaagcccgactggcaaggatttgttccatacgtgccagaatcacttcctgctgtaaagtcggttgcaatggtaccgcgaggacttcacttttacgccaggaagtattactgcatcctgcaagcgtaagtgctgtcgcaacgaaacaccagcgcaaaaaaggcttcatttcccactcccgaagaccacggttgaatgaacgtcctgttcccggttgctaacaaggcgtcctgcccggttaaaagccccccgccgcagcgganggcaaatggcaaccttactcgccctgttcagcagccggagcttccggtgctgcagcaggttgagactgctcagtcgcttctttaatgctcagacggatacggccctggcgatcaacttccagaactttcaccggtacttcctgacccatctgcaggtaatcggtcactttctcaacgcgtttgtcagcgatttgagagatgtggaccagaccttctttaccgccgccgatggcaacaaatgcgccgaagtcaacgatacgggtcactttaccagtgtagacgcggcccacttcaatttctgcagtgatctcttcgatacgacgaatagcgtgtttcgctttctcgccatcggtcgctgcgatcttcacagtaccgtcatcttcgatttcgatggtggtgccagtttcttcggtcagggcacggatcacagagccgcctttaccgataacgtctttgatcttgtccgggttgatcttgatggtatggatacgcggagcgaactcagagatatcgccacgtggcgcgttgatcgcctgttccattacacccaggatgtgcagacgcgcacctttagcctggttcagtgcaacctgcatgatctctttggtgataccttcaattttgatatccatctgcagtgcagagataccgtcgcgggaacccgcaactttgaagtccatatcgcccaggtgatcttcgtcgcccaaaatgtcagacagtacaacgtagttgtcgccttctttcaccagacccattgcgatacccgcaacggcagctttgattggcacacctgcgtccatcagcgccagagacgcaccgcacacggaagccatagaagaagaaccgttggattcagtgatttcagacacaacacgtacggtgtacgggaatttgtccatatccggcattactgccagcacgccgcgcttcgccagacgaccgtgaccaatttcacgacgcttcggagaaccgaccatgccggtttcgcctacggagtacggagggaagttgtagtggaacaggaaggtatcggtacgttcgcccatcagttcatcaagaacctgcgcgtcacgagcagtacccagcgttgcggtaaccagcgcctgcgtttcaccacgggtgaacagcgcagaaccgtgagtacgcggcagcacgccagtacgcacatccagaccacggatcatatctttttcacgaccatcgatacgcggttcgcctgccagtacgcggctacgaacaacgtttttctcgatcgcgtgcagaatttcacccagttcgttttcgtccagggtttcgtcttcagcaagcagcgtcgcgatggtttcagatttgatgacatcaacctgcgcataacgctcttgtttgtcggtgatgcggtaagcatcgctcagacgagcttcagccagtgcagcaacgcgnnnnntcagcgcttcgtttaccggctccggctgccagtcccaacgcggtttaccggcttctttcaccagttcattgatgttctgaataacaacctgctgttgttcatgaccgaacactactgcgcccagcatctggtcttcgctcagcagttcagcttcagattcaaccatcagtacagcggcttcagtacccgcaacaaccagatccagtttgctctctttcagctcgtcctgagtcgggttcagtacgtactggtcattgatgtaacctacacgggcagcaccaatcgggccattgaacggaataccagacagagacagtgctgcggaagcaccaatcatcgcgacgatatccgggttaacctgcgggttaacagaaaccacggtggcgataacctgaacttcgttgacgaagccttccgggaacagcgggcgaatcgggcggtcaatcagacgcgcgatcagggtttcgccttcgcttggacgaccttcacgacggaagaagctacccgggatacgaccagcagcgtaggtacgctcctgatagttaacggtcagtgggaanaagtcctgacctggtttggcttttttctggccaacaacggtaacaaataccgcggtgtcatccatgctaaccataacagcggcagtagcctgacgagccatcatgccggtttccagagtcacggtgtgttggccgtactggaatttacgaacgatcggattaagcaatgtaatatcctttctctttcttagacagtaccttacggcactggtgttaatacccgatcttctgcgcatcctcgcgactaatgacaaccctaacccagctctatgtgggtaaagcctctcattagccgcgcgaacctctgcaacggaagatcattcatagcaacaatacattagtttccagtgaattgctgccgtcagcttgaaaaaaggggccactcaggcccccttttctgaaactcgcaagaattagcgacgcagacccaggcgctcgatgagctgggtgtaacgtgctacgtctttacgtttcaggtagtcgagcagtttacgacgctgagaaaccatgcgcagcagaccacgacggctgtggtgatcttttttgtgctctgcaaagtggccctgcaggtggttgatctgtgcagtcagcagtgctacctgaacttcggtagaaccggtgtcgtttgcgtcacgaccaaactcagaaacgattttagctgttgcttcagtacttagagacattttaaaactccaaagtatatagaatgaaaggacgccgatctctaattcagcgatcccagtgtacgttacgcaaagtgttaaacaatttacgcgacgttaagcggcagtattctactcgtagcgacctgttatcgcaagacggttaacattacgccgggtattcaaccaccagacgacgaggcgcaacgcggccttcatcgtcaatttcgcccataccgataaacttgccgttctcaccttccgtaacgcgaaccagtccttccagcggcgngccagatgtacgaaccgggttaccatttttgaagtaaacagaagacgttaacggaagattcaccaccgggtagtccgaagctggactgtccattggcatcagtaatggatcaagcaactccgcagccggaatatcctgctgttcggcttgttcgaccagttcacgcaggtgctccagggtcaccatccgttcaaccggatatttacttaccgccagacgacgcaggtaaatcacatgcgcgccacagccgagtttttcacccaggtcatcaatgatggtgcggatataagtgccttttgagcagtgaatttccagctccagctcattgccttcatggcgaataaacagcaattcataaacggtaattggacgcgcttcacgcggaacttcaatgccctgacgcgcatattcgtacagttttttgccctggtatttcagtgctgaatacatcgatgggatctgttcgatatcgccacggaaagtatccagtgccgccgccagttgttctgcactaaaggttaccggacgctcttcaacgatttgtccgtcggcgtcagaagtatcggtacgctgtccaagacgcgcaatgacccgatagcgtttgtcggagtccagcagatactgggaaaacttcgtcgcttccccgaggcaaatcggcaacatgccggtcgccagcgggtccagcgcaccggtatgcccggcacgattggcgttatatatacgtttcactttttgcagcgcatcgttgctggacataccctgcggtttatccagcaacaaaacgccgttnnnntcgcgaccgcgacgacgaggacgactcattagtcctccttgctgtcgtccgggttaacacgacgttcttcgtcatgtttgaccacgctggtcaccaggtttgacatacgcatcccttcaaccagagagttgtcgtagaagaaggtcagttccggcacgatacgcaggcgcatcgctttacccagcaggctgcggatgaaaccagaagcttcctgcaacgctttgatgcccgctttaaccgcgtcttcatctttgtcgttgaggaaagtcacatacactttggcatacgccaggtcgcgagacatttcgacaccggaaacggtggtcatcatgcccagacgaggatctttaatttcacgctgcaggatgagagcgatctctttttgcatttcctgcgctacgcgctgcgggcgaccaaattctttcgccataataaattctcctgacaaaaaaggggctgttagccccttttnnaaaattaatttcaggtggaagggctgttcacgttggcctgataagacgcgccagcgtcacatcaggcaatccatgccggatgcggcgtaaacgccttatcccgcatggaaccctaaaaaccttaagcgatggtacgttggatctcgatgatttcgaatacttcgatcacatcgccagtgcggacgtcgttgtagttcttaacgccgataccacattccataccgttacggacttcgttaacgtcatctttgaagcggcgcagggactccagctcgccttcatagataaccacgttgtcacgcagaacgcggatcgggttgtgacgtttaaccacaccttcggtaaccatacagcctgcgatggcaccaaatttcggcgatttgaacacgtcacgaacttccgccagaccgataatctgctgtttcagttccggagacagcataccgctcatcgccgctttcacttcgtcgatcaggttatagatgacggagtagtaacgcagatccaggctttccgcttnaatcactttacgtgcagaggcatcagcacgtacgttgaagccaaccaggatggcgttggacgccgcagccagggtggcgtcggtttcggtgataccacctacgccagaaccgatgatcttcactttaacttcgtcagtagacagtttcagcaaggagtcggagatcgcttcgacagaaccctgtacgtctgccttcaggacgatattcacttcgtgaacttcgccttcggtcatgttggcgaacatgttctcgagtttagatttctgctgacgcgccagtttaacttcgcggaatttaccctgacgatagagtgcaacttcacgcgctttcttctcgtcacgtacaacggtaacttcatcacccgcagccggaacaccggacaagccgaggatttccaccggaatggacggacccgcttccagcacttcctgacccagttcgttacgcatcgcacgaacacgaccgtattcgaagccacacagaacgatatcgccnttgtgcagagtaccttcacgtaccagaacggtagcaaccggaccacgacctttatcgaggaaggattcgataaccgcaccgctcgccatacctttacgtaccgctttcagctccagaacttccgcctgcagcaggatagcgtccagcagttcatcgataccggtacccgctttcgcagatacgtgtacgaactggctttcaccgccccactcttccggcaggatgccgtactgggagagttcgttcttaacgcgatccggatcggcttctggtttatcgatcttgttcactgcaaccaccaccggtacctgcgccgctttcgcgtgctggattgcttcgatggtctgcggcattacgccgtcgtcggcagcaacaaccaggactacgatgtcagttgcctgcgcaccacgtgcacgnattgaagtaaacgcggcgtgccccggggtgtccaggaaggtgatcatgccgttttcagtttcaacgtggtatgcaccaatgtgctgggtaatgccgcccgcttcgccagaggccactttcgttgaacgaatgtagtccagcagagaggttttaccgtggtcaacgtgacccatgatggtcacaaccggagcgcgcggttcagccgcagctcccgtgtcacggtcgctcattaccgcctcttccagctcgttttcacgacgcaggataactttgtggcccatctcttcagcaaccagctgtgcggtttcctgatcgataacctggttgatggttgccattgcgcccagtttcatcatcgctttgatgacctgagagcctttaaccgccatcttgttcgccagttcgccaacggtgatagtttcgccgatcacaacgtcacggttaacggcctgagcaggcttctggaagccttgctgcagcgaagaacctttacgttttccgcccttaccgccacgtactgctgcgcgtgcttcttcacgatcagcttttgattcagcgtgtttgttgcctttcttcggacgcgctgctttcgcgttacgaccacggccacggccgccttcgacttcacgatcgctttcgtcttctgcctggcgagcatgttgagaagtagtgacgtgataatcgctggaatcctcagtcggttccgcgttatcagtccatttgttttcttccgccatacgacgtgcttcttcagcaacgcgacgtgcttcttcttcgagtttacgacgcgcttcttcttcggctttacgcttgagctctgcagcttcctgctcacggcgggctttttcagcctgggcgtttttagtcatatcgtcttgttgattgctcactttgtctttttccgcagcttcacgtttcgcttgttcagcagcttcacgcttagcttgttctgcggcctcacgttcagctttttgttgcgcctcgcgtttagccgattcttctgcctcacgacgggcttgctcttccgcttcacgctgcgcttgctcttccgctgcaaggcgttcagcctcttgcggatcgcgtttcacaaaggtgcgtttcttgcggacttcgatttgtaccgatttgctttttccaccggtaccaggaatgttaagggtgctgcgtgttttacgttgcagcgtcaatttgtccgggcctgaatttttctgattcaggtggtcaatcaaagtctgtttctcttgtgcagacacagagtcgtcagcagacttccggatacctgcatcagcaaattgctgtaccaggcgttccacggaggtctgtcgctctgcggccagcgttttaatcgttacatctgtcatgctgttccttcctgctacagtttattacgcttcgtcaccgaaccagcaaatattacgggcagccataatcagtgctccggctttttcgtcggtcaacccttcgatatcagccagatcatcaatgccctgttcggcgagatcttccagcgtacaaacgccacgggcggccagtttgaatgccaaatcacgatctaccccttcaaggttcagcagatcgtcagccggtttgttatcaccgaggctttcttcctgggcctgtgcaatggtggccagtgcatttttagcacgctcgcgcagtgcttcaacggtcggctcatcaaggccttcgatttccaacagctctttcatcggcacataggccagttcttccagcgtcgagaagccttcctctaccagaacagtcgcgaagtcttcgtcgatgtcgagatatttggtgaaggtgtcgatcgctgcgtgcgcttccgcctgatgcttagcctgcaggtcgtcaacggtcatcacgttgagttcccaaccgctcagctgcgaagccagacgcacgttctgaccgttacggccaatcgcctgcgccaggttaccggcttcaacggcgatatccatggtgtgtttatcttcatccaccacgatagaagcaacgtctgccggtgccattgcgttaatcacaaactgcgccgggttatcatcccacaggacgatatcgatacgctcgccgcccagttcagtagaaaccgcctgaacacgcgcgccacgcatacctacgcaagcacctaccggatcgatacgtttatcgttggttttcaccgcgattttcgcacgagaacccgggtcgcgagccgctgctttaatttcaatcacttcttcgccgatttctggcacttcaatacggaacagttcgatcagcatttccggcttggaacgagtgacgaacagttgcgcgccacgcgcttccgggcgaacggaataaagcacgccacgaacgcggtcgccagggcggaagttttcacgcggcagcatatcttcgcgcaggatcacggcttcagcgttgttgcccagatccagagagatgttgtcgcggtttacttttttcaccacgccggtgatgatttcaccttcgtgttcacggaactgatcaaccaccatcgcacgttcggcttcacgcactttctgcacgataacctgttttgccgtctgggtggtgatacggtcaaaggtaacagactcaatctgatcttcaacgtaatcgcccaggttcaggctttcatcttcataacgtgcggcttcaagggtgatttccttggtcggctgggtgacttcatcaacaactaaccagcgacggaaggtgtcaaaatcaccgcttttgcgatcgatctgtacgcggacgtcgatctcttgttcatattttttctttgttgctgtcgccagcgcgctttccaatgcttcgaaaatcttctcgcgaggtagcgccttttcattggatacggcttcaactacagccaaaatttctttgttcatcgcgggcttttcacctcatccagactattaaaagtggggaaccaggttcgccttctggatattactcagngcgaacacttcatctttaccttcgacggtaactgtgatcatttcaccgtctaccgctttgataacgccctgccatttacgacggttttgtaccgccatacggagaaccagagtcacctcttctccgacaaaacgggcgtagtgttcagccgtgaacagtgggcgatcgagacccggtgaggagacttccaggttataagcaacggtgatgggatcttcaacatccagcacagcacttacctggtggctcacatcagcacaatcatcaacattgatgccatcttcactatcaatatagatgcgcagtgtggatgtgcgaccgcgaataaattcgatgccaaccagttcaaaacccagggcctcaactggcgcagtaatcatctctgttaatttttgctctaatgtggacaagcccacccccaagacataaaaaaagggcctaaagcccagttattctgtagtcagataacaaaaaaccccgataaatcggggctttatataactgaaccctataaccgcaactgcggtctggagcactttccagaaggattttttcaaatcccactacgaaggccgaagtcttcacagtatatttgaaaaaggactctaagggaaagtggttgcgggggccggatttgaaccgacgaccttcgggttatgagcccgacgagctaccaggctgctccaccccgcgcctgaaacgtggcaaattctactcgttttgggtaaaaaatgcaaatactgctgggatttggtgtaccgagacgggacgtaaaatctgcaggcattatagtgatccacgccacattttgtcaacgtttattgctaatcacgtgaatgaatatccagttcactttcatttgttgaatacttttgccttctcctgctctcccttaagcgcattattttacaaaaaacacactaaactcttcctgtctccgataaaagatgattaaatgaaaactcatttattttgcatanaaattcagtgagagcggaaatccaggctcatcatcagttaattaagcagggtgttattttatgacgacgattctcaagcatctcccggtaggtcaacgtattggtatcgctttttccggcggtctggacaccagtgccgcactgctgtggatgcgacaaaagggagcggttccttatgcatatactgcaaacctgggccagccagacgaagaggattatgatgcgatccctcgtcgtgccatggaatacggcgcggagaacgcacgtctgatcgactgccgcaaacaactggtggccgaaggtattgccgctattcagtgtggcgcatttcataacaccaccggcggcctgacctatttcaacacgacgccgctgggccgcgccgtgactggtaccatgctggttgctgcgatgaaagaagatggcgtgaatatctggggtgacggtagcacctataaaggaaacgatatcgaacgtttctatcgttatggtctgctgaccaatgctgaactgcagatttacaaaccgtggcttgatactgactttattgatgaactgggcggtcgtcatgaaatgtctgaatttatgattgcctgcggtttcgactacaaaatgtctgtcgaaaaagcttactccacggactccaacatgcttggtgcaacgcatgaagcgaaggatctggaatacctcaactccagcgtcaaaatcgtcaacccgattatgggcgtgaaattctgggatgagagcgtgaagatcccggcagaagaagtcacagtacgctttgagcaaggtcatccggtggcgttgaacggtaaaacctttagcgacgacgtagaaatgatgctggaagctaaccgcatcggcggtcgtcacggcctgggcatgagcgaccagattgaaaaccgtatcatcgaagcgaaaagccgtggtatttacgaagctccggggatggcactgctgcacattgcgtatgaacgcctgttgaccggtattcacaacgaagacaccattgagcagtatcacgcgcatggtcgtcagttgggccgtctgctgtaccaggggcgttggtttgattcccaggcgctgatgctgcgtgactctctgcaacgctgggttgccagccagatcactggtgaagttaccctggagctgcgccgtgggaacgattattcaatcctgaataccgtctcagagaacctgacctacaagccagagcgtctgacgatggaaaaaggcgactcggtgttctcgccagatgatcgtatcggtcaactgaccatgcgcaacctggatatcaccgatacccgcgagaaacttttcggttatgccaaaactggcctgctttcctcctctgccgcttcaggcgtgccgcagatggagaatctggaaaacaaaggccagtaattcgacatcaaccctgcccttcaggggtggggttaccttgcttatcctctgtaaactcctttctgagcatcacataatcgaaaacatcatggtttgcatccacaacccgtgagtctcctttatagtgtacaatcacttcctcaagcgtttgcggctgttccggctttgttacccccatccacgcattaataaggtaattattgtaagctgtcgaaaagatgttgttttccgttgtgcgatccacaccatccccaagaacggggctataccagataaacatcggaacatgatatgcctgctggctggcctccctgcctccatgaaaatagacgttcttcttcgtagggtcacgttccaggccgtggtcggcaaaatacatgaccgaggcgcggcgatcttttaataattcaaaaacctgacctagcaaactatctgtgtaatgaatggagttgtcatagcaggcatcctgatcgtcctgcggttgaaacacggcgctggattgcggataggcgctacaagccggttcatggcttccatttaaatgaagaacaatcagtttcttttgctgcgtattttgctgtaatgcttgcgntaaatgcggcaacaacaattcatcaaatcctctgacataaactgtttccatggcacgcatggcgatactggtaactgctgtaccattctgccgaaaagcggattgcgagcttagccagaaagtctgaaatcctgcttgattagccatattaataatgttgtcggggtaattatgaatgtcatggctcaaaacagaatcagcagttaaagaaaggggaaccgacagcgcagtgtaaggtgcaccgcttattgcttgattaaacagtttgatctgttttctttgtgcttcgacttgcggtgtcgtagagcgtgtatatccatacaaagacatattgtcgacacgtacagactcccccacaatcaacacgtaggtatcaatacctgtatccctgactgataattgaaaatacggcactgtgtttgcaattgagagtaatctttgatgctctttcgctgctaaagcaaaataattgagattgaaaaacggcgtataggtagcaaatcgcgacgctagtatatatggactgaacgcatttttatttttggcatctttataagcaaattgacaagcggaaaataaacttcccgaaatgacaatcagcaataatattcctgtcactttttttgtcggcaaggaaacatcatattttattattacagccaaaaaaagaagggataaaaaggcaaaagcacatagataagggctatacattcccagcattttggcaacttcatccggatcactctgcagcacactaatcgcaaatccatcattgaaagttgtaccaaaggtacaccatgaatagaggctaatactcatgtctgccgcagtcagtaacacaaatggtgcggcaacaagcaggcgaagcggaagggatgatatacgtttaacaaccaggatggtcagaacgaagaacagcaatcgctgaaccatatgcgctccggaagaggcgactaagttcgtaataccaaaaacaataacactaagatacaacaaccaatgagatttaaaacttctagcaaatttgttgaatactgtcatccagaaatccaagttcacaaccaatataaacaattatcaacaatgtgcaattttatatcagacatgtttttcaactctgatccatatcagaacgaaacactgttagttttttctttttaaatgatgcggccattgcgttctcagtaattaaataacattatcaatgcgtctctaaacattacgcagaacgtagccatcagtagttatactgacaggagcaggatggtttatcgagaagtaaacatatccgtattcgtaccggaactggagttgacacaataaagtgccaattatgtcagcagtagggaaaagtttataacgaaggcgtaccggcaccatcgtttcaaggtaccagctacgagtaaagcaactggacgagatacagatacctgacaaccattcctcagaccaggaccaaaacgaaaaaagacgcttttcagcgtctcttttctggaatttggtaccgaggacgggacttgaacccgtaagccctattgggcactaccacctcaaggtagcgtgtctaccaattccaccacctcggcacggaaactactttttagttcgggatatcgctggtcggcttagccggagcagctggctgagtttgttcggttttcgccggcgcactcaggttttcccattcgctacctttattggtcttgttgctattgatgttacccagcaccagactgatgatgaagaataacgttgccagcaacgccgtcatgcgggtcatgaagttaccagaaccacttgaaccaaacagcgtagcggaagcgcctgctccgaaggaggctcccatatcagcgcctttaccttgctgtagcatgatcagaccancaaggccaattgccacaataaggaaaactaccaaaagagcttcgtacataatcaacctgttccttgcggagttgccgcgtaccaatgcttcaaccaataaagcgggagtttataatctttcccactgaagcgggtgtgaatactaaccaaagcgaatgaccttcgcaagggcaattttatcgcattgtatcaactgcggaaaaaaacagcaaaaccgatgtgttcgccgagaaaaaaggcgacaatcgccgcctttttagccagttatctaacgctttaaacggcttttactgcatcggcgatgcggtgtgcaaattcagtcacctgcgcttcgtcttcgccttccaccatcacgcgaattaacggttcggtgccggatttacgcaacagcacacgtccacggctacccagcgccgcttcaacttctgcagtcaccgctttgactgattcatgctccagcggatcgccgctacctgcggtgtaacgcacgtttaccaggatttgcgggaacattttcatgccgctgcaaaggtcgtgcaggctcatatggttacgcgccatcgccgccagcacctgcaaaccagcaacgatgccgtcaccggtagtggttttatccagcaggatcacatgaccggaattctctgcaccgatacgccagcctttctcctgcattttttccagtacgtagcggtcacccactttcgnnnnnncaaatggaattcctaactgtttcagcgccagttcaagccccatgttgctcatcaatgtacccacagcgccaccacgcagctggccctgacgaagaccttcacgcgcgatgatatacatgatctgatcgccatcgactttattgccttcatggtcaaccataatcacgcgatcgccgtcgccgtcgaaggcaataccgagatccgctttttcagccagcacacgagcctggagcgcgcgaacgtcggtagcccccacttcggcattgatgtttacaccgtttggctcacaaccgatagcgataacattcgctcccagttcgcgcagcacgttcggcgcgatgtgataagtcgcaccgtttgcgcaatccaccacaatcttcagttcactgaggctaagttcgttcgggaacgtggctttgcaaaactcgatatagcgacccgcagcatcaacgatacggctggctttacccagttctgccgaatcaacacagctgatctctttttccatttccgcttcgatggcttcttcaactgcatccggcagcttagtaccgtcaatagaaaagaatttaatgccattatcgtagaacgggttatgcgatgcagatatcacaattccggcctctgcgcggaaggtacgcgtcagataagccacggccggtgttggcatcgggccagtgaagagtgcggaaaggcccgcagccgccagccccgcttccagtgctgactccagcatatagccagaaatacgcgtgtctttaccaataataatcttacgggagccgtggcgcgccagcactttacccgcggcccaacccagcttaagcacaaaatcaggtgtgatcggcgcatcccctacacgaccacgaatcccatcggtaccgaaatatttacgattactcatagcgtttgttttcctttgcagacagagtagcttccaccactcgcatcgcttctacggtttctttgacgtcatgaacacgaataatgtgcgcgccttgcattgcggcaatgaccgcacaggccagactaccgctcaggcgctcggacggccccacgttcagcagctgcccaatcatcgattttcgtgacatacccaccaacagcggcaggttgaaatggtgaaattcagccaggcgcgccagtaatgaatagttatgggagagatttttaccgaaaccgaatccggggtcgagcaacaatttctcttttgcgatacccgcctgctcgcaacgtgctatttgctcaataaagtagcgattcacttctgcaaagacatcgtcatacttcggggcttcctgcatggtttttggatttccctgcatatgcatcagacaaaccggtaaaccggtttctgcagccgcctccagagcgccaggttcggaaagggagcggatatcgttaataatgtgagcgccaactttcgctgactcacggatgacttctggtttggatgtatcgaccgagatccagacttcgaagcgttgagcaattgcctcaaccacaggaataacacgttgcaactcttcttcaacgctaacttccgccgnccctggccgcgtggantcgccaccaacgtcaatgatcgtcgcgccagcgttgatcatcagattcgcatgtttcaccgcatctatcagcgagttatgcgtgccaccatccgaaaaggaatcaggcgtgacgttgaggatccccattacgtgaggatggctaaggtccagtgaagtaccctgggcaaagagtttcatgatgttatccctggtatgaattgataagaaaaaaccccggagcacgccccggggttttcggtacaaatacagtcatctgatgcgggaacttacttgtcgcctaactgctctgacatggtgttacccgggttcggcgtacgcggttcatcaaccggacgaggagcctttggactaccattgtcgccagaattgttagaagcgcctggttcttcccagcccgctggcggacgtacatcgcgacgtgccatcaggtcatcaatctgcggtgcgtcgatagtctcatatttcatgagagcatctttcatcgcatgcagaatatccatattgtcggtcagaagctgacgcgcacgattatagttacgctcaatcagtgctttcacttcctggtcgatgatacgtgcagtttcatcggacatatgtttcgctttcgctacgctacggccgaggaacacttcaccttcttcttccgcgtacagcagtggacccaatttctcagagaagccccactgagtcaccatgttacgtgccaggttggtcgcaactttaatatcgttggacgcaccggtagaaacatgttccggcccgtagatgatctcttctgccagacgaccaccgtacagcgtagaaatctggctttccagtttctgacggctggcgctgattgcgtcgccctcaggcaagaagaaagtcacacccagcgcacgaccgcgtgggataatcgtcactttgtgcaccggatcgtgctccggcaccaggcgaccgataatcgcatgacccgcttcgtggtaagccgtcgattctttctgcgcttccgtcatcaccatggagcgacgttccgcacccatcatgattttgtctttcgctttctcgaactcaaccatcgacacaacgcgtttgttgccacgagcagcgaacagtgccgcttcgttcaccaggttcgccaggtcagcaccggagaaaccaggagtaccacgggcaatgattgccgcgtcgatatcgggtgccaatggtacgcgacgcatgtgaaccttcaggatctgctcacgaccgcgaacatctggcaagccaaccacaacctgacggtcgaaacggccaggacgcagcagcnctgggtcgagaacgtccggacggttagtcgcggcgataacgatgataccttcgttaccttcgaagccatccatctcaaccagcatctggttcagagtctgttcacgttcatcgtgaccaccgcccagacctgcgccacgctggcggcctacggcgtcgatttcatcgataaagatgatgcacggtgccgctttcttcgcctgttcgaacatgtcacgaacacgggatgcacccacaccgacgaacatttctacgaagtcagaaccggagatagtaaagaacggaactttcgcttcgcctgcaatcgctttcgccagcagcgttttaccggtacccggaggaccgaccatcaggacgcctttcgggatcttaccgccgagtttctggaagcggctcggctcgcgcagatactcaaccagttcagcaacttcttcttttgcttcgtcgcagcccgcaacgtcagcaaaggtcgttttgatctgatcttccgtcagcatgcgcgctttactcttaccaaacgacatggcacctttgccaccgccgccctgcatttgacgcatgaagaagatccagacaccaatcagcaacagcatcgggaaccaggagatgaagatagaagccagcaggctgggttcttcaggcggttcaccgacaaccttgacgttcttggtcaacaggttatccagtaatttcggatcctgaaccggaatgtaagtggtataacggttactatctttcttggtaacgttgatttcacgtccgttgatacgcgcttcacgaacctggtcgttattgacctcttgtaggaaggtagagtaatccaccttacggccattagactcgctgggcccaaagctctggaatactgacatcagcacaacggcaatgaccagccagagtattaggtttttcgccatgtcactcaagggattaacctcttattacaactgtgttaaaaacagcgtcaggatactctatatccagcatctttcaaactttcgtctgaaatctcccggttagggtttacgcccggtcgctacaatatacacttcccgcgaacgtgcacgagaagagtccggcttacgaactttgaccttcgtaaacagggagcgaatttcccttagatactcatcgaaaccttcgccctggaacaccttcactacaaaactgccacctggcgctaatacatcacgacacatttctagcgccagttccaccagatacatggcacgggggatatccaccgccggtgttccgctcatgtttggtgccatatcggacatgacaacctggactttgctgtcgccaacgcgctccagcagtgctttcatcaccagttcatcacgaaaatcgccctgaagaaagtccacaccaacgataggatccataggtaaaagatcgcaagcgatgatgcggcctttgccgccaatttgggtgaccacatattgtgaccaaccacccggagcagcaccaaggtcgacaaccgtcattcccggtttaaagagtttgtcactttgctgtatttcatcaagtttaaaccaggcacgggaacgtaacccctttttctgtgcctgttgaacatatttatcgctaaagtgttcctgaagccagcggctggagctggcagaacgcttcttacctgtcatttaactttcccatggggataactcatcgtaaccaattgcgtaaatttttacgcgcctatttggtgatatatgggagatggcggtagaatgacccgttttcaatcccaacgtaagcaaaaaatacgatgaatctgagtactaaacaaaaacagcacctgaaaggtctggcacatccgctcaagccagttgttctgcttggcagtaatggtttgaccgaaggggtgctggccgagattgaacaagcgttagagcaccatgaactcatcaaggtgaaaatcgccaccgaagatcgcgaaactaaaaccttgatcgtggaagctatcgtgcgcgaaaccggcgcctgtaatgtacaggtcatcggtaaaacgctggtgctttatcgcccaactaaagaacgtaaaatctcgctgccacgctaagattatcctaaagttacacacatttgctgtgtaaaacgaggggttttccgcaggcaggagagcaaaatgccacgctctgttcgttgataaaaggccgctatgcggcctttttcctttctttacaatacatcaacatcttgagtattgggtaattcttacaggtattccaccttaattacttcaaattctacttcgccgcccggcgttttgatgaccacaacatcatcttcttctttgccgatcaggccacgagcaataggtgagtttacagaaatcaggttttgtttaaagtcagcttcgtcatcgccaacgatgcgataagtctgttcttcgtcagaatcgagattcagcaccgttacggtagcaccaaaaataacgcgcccattgttgggcattttggtgacatcaatcacctgcgcgttcgacagcttggcttcgatgtctttgatacggccttcgcagaagccctgctgttcacgagctgcgtggtattcggcgttttctttcaggtcgccatgctcacgcgcttccgcgatagcagcaatgatttcaggacggcgcacagatttcagaaaatccagctcttcgcgtaatttttcagcgccgcgtaaggtcatcggaatagcttgcatttgttatacctcttgaatattcctgatggggcaagtgttcacccaccccggctgttcggcctgcccggcataactcctcaccgggaccagaagcaaaaaaataccgacccgggtacaagtcccaggtcagctacaattcacattttgatagtcattttaccctgaagttcccgaagggtcatcgtttactttatagggcgttgcgccgtagtatgacggctcgattccaggttgttagcgcgagattatgcgattttccagatttatcatcggattgaccagctgtatagcgttcagtgttcaggccgcaaatgttgatgagtacattactcaactccccgctggtgccaaccttgccctgatggtgcaaaaagtcggcgcgtcggcccccgctattgattaccacagtcagcagatggcgctgcccgccagtacccagaaagtgattactgcgctggcggcgttgattcaactcggccccgattttcgtttcaccacgacgcttgaaaccaaaggcaatgtggaaaacggcgtacttaagggtgacttagtggcgcgatttggtgccgatccgacgttaaaacgtcaagatattcgcaatatggtcgcgactttgaaaaaatctggcgtcaaccaaatcgatggcaatgtgttgatagatacctccattttcgccagccacgataaagcccccggctggccatggaatgacatgacacaatgctttagcgctccgcctgccgtcgccatagttgaccgcaactgtttctccgtctcgctctacagtgccccaaaacctggtgatatggcttttatacgcgtggcatcttattaccccgttacgatgttcagccaggtacgcaccctcccccgtggttctgccgaagcgcaatactgcgaactggatgtggtgccaggcgacctgaaccgctttacgctgacgggatgcctgccacaacgttctgagccgctcccgttggcttttgccgtgcaggatggagccagctatgccggtgcaattctgaaagatgagttaaaacaggcgggtatcacctggagcggaacactgctgcgccagactcaggttaacgaacctggaacggtagttgccagtaaacagtcggccccgctgcacgatctgcttaagattatgctgaaaaagtcggacaacatgatcgccgatacggttttccgcatgataggccatgcgcgcttcaatgtgcctggaacatggcgggccgggtcggacgctgtgcgtcagatcctgcgccagcaagccggtgtcgatattggaaacaccattattgccgatggttcagggctttcgcggcataacctgattgcccccgccaccatgatgcaggtgctgcaatacattgcccaacacgacaatgaacttaactttatctccatgctgccgctagcgggctatgacggctctttgcagtaccgtgcaggtctgcatcaggcgggcgtggatggaaaagtctcagcgaaaaccggttcgttgcagggggtatataacctggcgggattcattaccacagcgagcgggcaacgaatggcgtttgtacaatatctttctggctatgcagtagaaccggcggatcagcgtaatcgccgtattccgttagtgcgttttgaaagccgtttgtataaagatatttatcagaacaattagtcaaaaagaaaccccggcacatggccggggttttgctgattaacgcttgtaaatgaactcaacgccttcttcgtcgtcttcgtcccagtcgtcatcccagtcctcatcatcctcttcagcaatctcttcaagctgctggcgatgataatcatcccacatgaattcgactttctctggctgtttcgcttcttcagcctgcacgaccgggttttcaatgataaaggtcatcacatcccagcagagatctttcacgcccagtccactcgccgcagagatcagataatatttatcttcccagcccagcgcctctgcgatcgctttcgctttctcttcggcttctaccttatccagcagatcgatcttgttgaagactaaccaacgcggtttcgccgccagatcctggctgtatttttccagctcgctgnnnnnnnnnnnnncgttttcaaccggatcggtgccgtcaatcggatcgatatcgatgaggtgcaacaggacgcggcaacgttccaggtgcttcaggaagcgaatgcccagacctgcgccttccgcagcgccttcaatcagtcctggaatatcggcaacaacgaagctcttttcgttgtccattcgtaccacacccagacttggcaccagagtggtaaacggataatccgccactttcggtttagccgccgataccgcacgaataaaggtcgatttacccgcgtttggcatccccaacataccgacgtcagccagcagcatcagctccagcagcagctcacgcttatcgcccggcgtaccgttagttttctgccgtggtgtacggttaactgacgatttgaaacgggtattgcccagaccgtgccagccgcccttagcaaccagcagacgctgaccgtgtttggtcatatcgcccatggtttcaccagtaccctggtcgattacacgcgtacctaccggcactttaattgtgacgtctttaccgcgcttaccggtacagtcgcggcttgcgccattctgaccgcgctctgcacggaaagatttttcaaaacgataatcgataagcgtgttcaggttctcgtcggcttccatccatacgtcaccaccatcaccgccgtcgccgccatccgggccgcctttcggaatatacttttcgcggcggaagctcacgcaaccattaccgccatcacctgcaacgaccagaatcgatgcttcatcaacaaacttcattttattctccgtaaatcattcgcctgcgcggggttgcgataccaccgttgtatgcttacgtaatccgccccaaatacgatgaccaatggcggaatacatcgcgcccgcaaccacgacaaacgcaccgagataacctaaaaggtttaacatcggtctggcgaagaaatcgggccaggccagtgataaaagatctgaaaaaaacagcgtaaacagtggggtgagcgtgatgatcgcgctcacctgcgctgcctgccagcgagccatcgcttccgccagggcgccatatcctaccaaggtattcagtccgcaaaaaattaaacatgcgagctgccagtggctaagctgcnctatcactccaggctttgccagagggaagagcgcaattgtacataaagtgtacagtaaaaacaggatctgcggtgaggccagccgacgcaataaaaccttttgcgccacgccataactcacccaaaccgtcgcagcaccgaccccaaagataactccccaggtgtaatcggttagctttgtaaatatctcgaccagactggtgttaaaaaacatcaccaggccgctcaggagcatcaatgcccctacaacctgagtgctgcgcattttctctttcaggataaatacgctggcaaccatcatgccaactggcgagagttgcccaatcacctgcgaagcggtcggactcaggtattgcaaggatgagctgaacaggatgaagttcccaaacagcccggcggtcgccactgccaacaaaatcaaccagcgtggcttacgaaacacgcgtaatggcggcaacctcttcttcaccgcaagaatggcccccaggccaatactcgccatcaagaaacggtaaaacacgattgtcggaggttccatcacctccagcacctgcttcattgcaattggcaacgccccccagcaaattgctgtggtgagcgccaaaagaatgccaatgcctgcctgctgcttcataccgtattccctgcaaagcgcatttgcggattaacgtcgcaccatgcgcatttttaccggttatcgaatgtaaaaagccccgcaacgtgttgcggggctttcatccgttaccgggacgcgaaaaacttattcagcttcgatgctgataaatttacggtttttcgggcctttaacttcgaatttcactttaccgtctgctttagcaaacagagtgtggtcacgaccgcaacctacgttagcgccagcgtggaatttggtaccacgttgacgaacgatgatgctacccgccagaacggattcgccaccgaaacgcttaacgcccaggcgtttagcttctgaatcgcgaccgttacgtgtggagccgccagcctttttatgtgccatttgaaatctctcctcaggtcttaggcgctgatgccagtaattttcacatcagtgaaccactgacgatggccctgctgcttacgatagtgtttacgacgacgaaacttaacgattttaactttctcgccacgaccgtgagcaacaacttcagctttgattacgccgccatcaacgaaaggaacgccgattttgacttcttcaccgtttgcgatcatcagcacttcagcgaactcaacagtttcgccagttgcgatgtccagcttttccaggcgaacggtctgaccttcgcttactcggtgttgtttaccaccactttggaaaaccgcgtacatataaaactccgcttccgcgcacaccttttcaatgattcagagtgcgctataaatattcacaatagggcgcgaatattacgcaaaacgcacgcctttgacaagtgctacagtcaatacacgaagaaaaaaaacacaacttgtacggtaacgtttatctgtgccattttttcagtacaatcaccctatattcctaaccataaaccctaagttgcctttgttcacagtaaggtaatcggggcgaaaagcccggcttttgcgatgaatttagaaaaaatcaatgagttaaccgcgcaagatatggcgggtgttaatgcggcaatccttgagcagcttaattccgacgtccaactgatcaatcagttaggctattacatcgtcagcggcggcggtaaacgtattcgtccgatgattgctgtactggctgcacgagctgttggctatgagggaaatgcgcatgtcaccattgctgccctgatcgagtttatccacacggcgactctgctgcacgacgacgttgtggatgaatcagatatgcgcaggggtaaagctaccgccaacgccgcatttggcaatgccgccagcgtgctggtaggcgattttatttatacccgcgcgttccagatgatgaccagcctcggttcactcaaagtgctggaagtcatgtcagaagccgtaaacgtcatcgcagaaggtgaagttctgcaactgatgaatgttaacgatccggacatcactgaagaaaactacatgcgcgttatctatagcaaaaccgcgcgtctgtttgaggctgccgcgcagtgttccggaattctggcgggctgtacgccggaggaggagaaaggcctgcaggattatgggcgctatctcggcactgctttccagttgatcgacgatttactcgattacaatgccgatggcgaacagttaggtaaaaacgtcggcgacgatctgaacgaaggtaaaccgacgctgccgctgctgcatgcgatgcatcatggcacaccagaacaggcacagatgatccgtaccgccatcgaacagggtaacggtcgccatcttctggaaccggttctggaagcaatgaacgcttgtggatctcttgaatggacgcgtcagcgcgccgaggaagaagcagacaaagccatcgcagcgttacaggtgctcccggacaccccttggcgagaagcactcatcggcctcgcgcacatcgctgttcaacgcgatcgttaatcccctcccctcatcccgcgcagtgcgcgggatgattccagtaaactccataagaatacctattcagcgtaataatgcactgaaaaaccagtgtatacatctttatatattctgaatattcacactctttacaggaactttttagagcaatcggccatcaggagtatagtgatgctcgacagaagaagtgttctgaatgaaagcgactaacttaaggagtgaggaaagatggaaagtaatttcattgactggcatcccgctgacatcattgcgggtttgcgcaagaagggaacatcaatggcggcggagtctcgcagaaatggtttgagttcctcaacgctggcgaatgcattatcgcgcccatggccgaaaggagagatgattattgcgaaagccctgggaactgacccctgggttatctggccatcacgctaccatgatccgcagacccatgagtttatcgacagaacgcagttgatgcgtagctacactaaaccgaaaaaatgagtggtctggcggtagccccgcgaacggggctgccagctctcagacgattattcgcctttcacacgctcaatatttgcacctaaagcgcgcagtttgtcttcaatgcgttcgtatccacgatcgatgtgataaatacgatcaaccaccgtcgtcccttccgcaatacagccagccagcaccaggcttgctgatgcacgcagatcggttgccataacctgtgcgccagaaagtttttcaacaccgtgacaaataacggtattgctttcgatttcggngtgcncgcccatacggctcagctctggcacatgcataaagcggttttcaaagaccgtttcggtgatgaatccagtcccttctgccaccaggttcaacagcgtgaactgggcctgcatatcggtcgggaatgccggatgcggcgcggtacgtacgttaacagccttcggacgtttgccatgcatatccaggctaatccagtcttcgccgacctcgatgtccgctccagcgtcacgcagtttcgccagcacggcgtcgagagtatctggctgcgtgttacggcagataattttgccgcgagaaatcgccgccgccaccaggaaagtaccggtttcgatacgatccggtagcacgcgatagacaccgccgcctaaacgttccacaccttcgatgacgatacgatcggtgccctgaccgctaattttcgcacccagcgtaatcaggaagttcgcggtatcgacgatttccggttcacgcgctgcgttttcaataatcgtggtgccttccgccagggttgcagcacacatgatggtcaccgttgcgccaacgctgactttatccatcacgatatgtgcgcctttcagacgaccatcgacggaagctttaacgtaaccttcttccagtttgatggtcgcgcctaattgttcgaggccagaaatgtgtagatcaaccggacgcgcaccgatcgtacaaccgccaggtagtgaaacttgcccctgaccaaagcgcgctaccagcggccccagtgcccagatagaagcacgcatggttttaaccagatcgtaaggtgcgcagaatacattaacgtcgcgggcatcaatatgcacagaaccattacgttctactttcgcacccagctggcttagcagcttcattgatgtatcgacgtctttcagtttcgggacgttctggatctctaccggttcttccgccaatagagcggcaaaaaggataggcagagcagcatttttagcgccggaaattgtgacttcgccctggagcttcgttggcccctgaacacgaaatttatccatttagtttgttctcagttaacaattcatatccgctaccggcgaatcgcccatagctcaaaagccgttcagtttgcgatcgcgcgcccactccgcaggggtatacgctttgatcgacacagcatgaatgcggttatccgcaatatattccatcagcggaccatagaccgtctgctgttttttaacccgactcatgccgtcaaacaactcacccacggcaataacctgaaagtggctgccatcgccggaaacgtggacttcctggagggagagagcgttcatcaacacgctctgaatttcattattttccatgggatcttcaatcatcagttaataaaccagcgaaacatcttagagcaaagttgcgctggcataaataagcaaaaagcctcgctgataaatcagacaaggctcgacttgcaggcaggtttgccggacaggcggttaacgccatatccggcctgaaaaaatttaacgaggcagaacatcagcaggcaaattatacaatttcgccagggtatacactttgtcgtttaccccctgaagcgtcacgttgttgccctgctttttcgccagatcgataagatggagcagcagtgccagtccacccgtatccacgcgggacacacggctaagatcgatgcaggtaatccccttcaccgcttcctcacgcatttcccaaagcggtagcagaacgtcctgatccagctctccggataacgccagtgtgtcacccgtctgcatccagctcagtgactcgctcattattttttctcttccagagtgattttctgttgagaaatcgatttcagttgcgcagtcaggccgtcgatacctttggtacgtagcagcgttccccactcgttttgtttggtggtgatcatactgacgccttcagcaatcatgtcgtaagcctgccagttgcccgtctgggagtttttacgccactggaagtccagacgcaccggcgggcggccattcgggtcaataatggtaacgcgaataggcacaatggttttatcacccagcggctgttctggcgcaatctgataggtttgaccgtgatacatcgccagcgcctgaccgtaagcctgcttcaggtactcacggaaagcggcaaagtaagcatcacgttgagctggggtcgcactcttgtaatactggcccagcaccagcgcaccggcgtatttcacctgtacgtatggcagcagttcctgatcaacaatggtacgcagataatccgggttggcccgaatttgcggttgctcattcttcaggcgatcgaacgttttctgcgccgcctcgtccatcagcttatacggattggtctggtctgccgcggttgccgcactcagcggtgcaatcaccagcaaagcgaccatcattaaacgtttaaacatgcgtcggttctcctgaaattatttcgttgtacccacaggttcagtggtttcattattacctggcgcagcagctggcgcatcgccactattcttattgtcatcgcctttactaccgtaaaggaactgaccaatgagatcttccagcaccatcgcagacttggtgtcctgaattgtatcgccatccttcaggatagcagtccccagttccgggtcttcaaaaccgacgtttaatgccagatattgttcccccagcaggccggaagtacgaatgctcagcgaactggtatcaggaatatggttataacgttgttcaatttccagcgttacgcgcggcagataggttttcgggtccagcgtaatatccgccacccggcccacaacaacgccaccaatactgaccggagagcgcgctttcaggccgccaatgttatcgaacgtcgcataaagcgtgtaggtcggttcagtacgtattgacgtcacgttcgccgccttcaggcaaacaaacagcgccgccagcagtgctgctaataaaaagatacccacccaaatttcattttttttcgtttgcatgaactcaattcccaaacatcaatgcggtcagcacaaaatccagccccagaacagccagagacgagtggacaacggtgcgagtggttgcccggctaatcccggcagacgtcgggatggcgtcgtagccgttaaacaacgaaatccacgtcaccgtgatggcgaacaccacgctcttaatcagacagttgaccagatccatacgccagtcgacggcattttgcattgccgaccagaagaacccgctatcaatgcctttccaactgacgccgaccagcgatccgccccagatccccacggcgacgaagataaccgtcaacagtggtaatgaaataaccccagcccagaaacggggagaaataacccgacgcagcggatccaccgccatcatctccatactggagagttgctctgtagcgcgcatcaggccgatttctgcggttagcgccgaaccagcacgcccggcaaacaacaacgcggcaaccaccggccccagttcacgcagtagcgataacgccaccagcatacccagactggtttccgcactataagtggtcagaaccagataaccttgcagccccaacaccattccgatgaacacgccagaaactacaataatcagcatcgacaggacgccgacattatagagctggcgcaccagcagcggcgcatgtttgcgaaattccggtttgccgaccagcgcattgaataacattaacccggcccgcccgaacgttctcagggttttaatccctttatgtccgagcgacgccagcgcatttaacagcatgagtggcttaactccctggtaaaagatcagcgtgataatcgccggcaggatagcggaacggaaccggcccgtcagctatcccgtccagaaactgacgtacgcgcggatcaggattcgcctgcaacgcctgggcactgccatgagcgacaatttttttgtccgccaggatccaggcgtgatccgcaatacttaacacttccggcacatcgtgagaaaccaccacacaagtcacgcccagcgcgctgttcagctcagaaatcagcttcaccagtacgcccatggtgatgggatcttgcccaacaaaaggttcatcaaacatgatgagatccggctccagcgcaatcgcacgcgccagcgctgcacgccgcgccatcccaccggaaagttcagaaggcattagtttagccgctccacgcagccccacggcctccagcttcatcatcaccgtactatgcaacaatggcgcgggaagttgggtatgttcgcgcagtggataggcgacgttgtcaaatacgttcatatcagtgaacaacgccccggactgaaataacatgctcatccgtttgcgcactgtatacaggcgcgaacgagacatcgccggaatattctcaccatcgaaaaggatctcaccatgatctggtgcgatttgcccgccaatcagacggagtagcgtcgttttaccgatgcccgatggccccatgatcgccgtgatcttccctcgcggcacggtcagggaaatattatcgaagatgcagcgattgccacgcgtaaaactgacatcgcgcatatcgactaaattcgccacagactgctccataattcacccttcgtcttgcgttgattttctaagcatggcgctcaatttaaccttgaacccaacatatttacagaatattacccgccgtggttagcgaaagctggcatttgttttactttttagccgcataaagtcaaaattaagaatccgttacggctttctgaaaatcttcagcggaccggcgagtatacctgaagaaaggacgttagatgcttttagctacggcactgttaattgttggtttacttttggtcgtttacagtgccgaccgcctggtttttgccgcgtctattctttgccgaacctttggcatcccgccgctgatcatcggcatgacggtggtcagtattggtacatcgttaccagaaatcatcgtctcgcttgccgcgtctctgcacgaacaacgcgatttagccgttggtacagccctcggctcaaacattatcaatatattgctgatcctcggtctggctgcgctggttcgtccttttaccgtccattccgatgttctacgccgtgaattacccttaatgttgttggtcagcgtggtggccggttccgtactctatgacggacaacttagtcgcagcgatggtatctttctcctctttctggctgtgctatggctgctgttcattgttaaacttgcacgtcaggctgaacgtcaggggactgacagcctgaccagagagcagcttgcagagctgccgcgtgacggcggattgcccgtcgcgtttttatggctcggcattgcgcttatcatcatgccagtggccacgcggatggtggttgataacgccacggtgctggcgaattactttgccatcagcgagttgacgatgggtctgacggcaattgctatcggaaccagcctgccggaactggcaaccgcaatagcgggcgttcgcaaaggtgaaaacgacattgctgtcggaaatatcattggcgcaaacatttttaatattgtcatcgtgttgggtttacccgcgctgataacgccaggagagattgatccactggcgtacagtcgtgactacagcgtgatgttgctggtgagcattatttttgcgttgctgtgctggcggcgctccccgcaaccgggccgtggtgtaggggtattattaactggcggatttatcgtatggctggcgatgttgtactggttatcgccaatactcgttgaataactggaaacgcattatgtcgcacgtagagttacaaccgggttttgactttcagcaagcaggtaaagaagtcctggcgattgaacgtgaatgcctggcggagcttgatcaatacatcaatcagaatttcacgcttgcctgtgaaaagatgttctggtgtaaagggaaagttgtcgtcatggggatggggaaatcggggcacatcgggcgcaaaatggccgcaacgtttgccagcaccggtacaccttcatttttcgtccatcctggtgaagccgcgcatggtgatttaggcatggtcaccccacaggatgtggtgattgctatctctaactcaggtgaatccagcgaaatcactgccttaattccagtgcttaagcgtcttcacgtaccgttaatctgcatcaccggtcgcccggagagcagcatggcnngcgnngnngatgtgcatctgtgtgttaaagtagcgaaagaagcctgtccgttagggctggcaccgaccagcagcaccaccgccacgctggttatgggcgatgccctcgctgtcgcgctgttaaaagcacgcggctttactgctgaagattttgcgctctcacacccaggcggcgcactgggtcgtaaacttctgctgcgcgtaaacgatattatgcatacgggcgatgagatcccgcatgttaagaaaacggccagtctgcgtgacgcattgctggaagttacccgcaaaaatcttggtatgactgtcatttgcgatgacaatatgatgattgaaggcatctttaccgacggtgatttacgccgtgtcttcgatatgggcgtggatgttcgtcagttaagtattgccgatgtgatgacgccggggggaatacgcgtgcgccctggcattctggccgttgaggcactgaacttaatgcagtcccgccatatcacctccgtgatggttgccgatggcgaccatttactcggtgtgttacatatgcatgatttactgcgtgcaggcgtagtgtaaagattcaaggataaacaacaatgagcaaagcaggtgcgtcgcttgcgacctgttacggccctgtcagcgccgacgttatagcaaaagcagagaacattcgtctgctaatcctcgacgttgatggcgtactgtcagatggcctgatttatatgggcaataacggcgaagagctgaaagcgttcaatgttcgtgacggttatggcattcgttgtgcgctcacctctgatattgaagtcgctatcattaccgggcgaaaggctaaactggtagaagatcgttgtgccacattggggatcactcacttgtatcaggggcagtcaaacaaactgatcgcctttagcgatctgctggaaaaattggcgattgccccggaaaatgtggcttatgtcggcgatgatctcatcgattggccggtaatggaaaaagtgggtttaagcgtcgccgtggccgatgcgcatccactgttgatcccgcgcgccgattacgtgacgcgcattgctggcggtcgtggcgcagtgcgagaagtttgcgacttattactcctggcgcagggcaaactggatgaagccaaagggcaatcgatatgagtaaagccagacgttgggttatcattgtgctatcactggcggttctggtgatgatcggtattaatatggccgaaaaagacgataccgcccaggtggtcgtcaacaacaatgatcccacctataaaagcgagcatacggacacgctcgtctataacccagaaggggcgctaagctatcgattgattgctcaacacgttgaatattattccgatcaggccgtttcgtggtttacgcagccggtacttaccacgtttgataaggataaaatcccgacatggtccgtaaaagcagataaagccaagctgaccaatgaccggatgctctatttatatggacacgttgaagtcaacgcacttgtgccggactctcaacttcgcagaatcacgacggataacgcgcagatcaatctggtgacgcaggatgttacctctgaagacctcgtcacgttatacggaacaacatttaactccagcggtctgaaaatgcgcggcaacttacgcagcaagaacgccgagctgattgaaaaggttagaacatcctatgaaattcaaaacaaacaaactcagccttaatcttgtgcttgccagctcacttctggccgccagcattccggcatttgccgtaaccggagacactgatcagccgatacacattgaatcggaccagcaatctcttgatatgcaaggcaacgtggttacctttaccggtaatgtcatcgtcacccagggcaccataaaaattaatgccgacaaagtggtcgttacccgtccgggtggcgaacaaggtaaagaagtgattgacggctacggtaaaccggcaacgttctaccagatgcaggacaacggtaaacccgttgaaggtcacgcttcccagatgcactacgaactggcaaaagattttgtcgttctgacgggtaatgcttatctgcagcaggtcgatagcaacattaagggcgataagatcacttacctggtgaaagagcagaaaatgcaggctttcagcgacaaaggcaagcgtgtaaccaccgttctggtgccgtcgcagctgcaggacaaaaacaacaaaggccagaccccggcacagaagaagggtaattaattcgttatggcaacattaactgcaaagaaccttgcaaaagcctataaaggccgtcgcgtggtagaagacgtcagcctgaccgtcaactccggggaaattgtcggtctgctggggccaaacggtgccggtaagaccaccactttctacatggttgtaggcattgtgccgcgcgatgcgggcaacatcattattgatgatgacgatatcagtctgctgcctctgcatgcacgcgcgcgccgcggtatcggctatctgccacaggaagcctccattttccgtcgcctcagcgtttacgataacctgatggcggtactgcaaattcgtgacgacttgtctgctgaacagcgtgaagaccgcgcgaacgagctgatggaagagtttcacattgagcacctgcgtgacagcatggggcagtcactctccgggggtgaacgtcgccgtgtagaaattgcccgcgcactggctgcgaatccgaaatttattctgctcgacgaaccgtttgccggggttgacccgatctcagttatcgacattaaacgcatcattgagcacctgcgcgacagcggcctgggcgtgctgatcactgaccacaacgtgcgtgaaacactggcggtttgtgaacgcgcttatatcgtcagtcaggggcatttgatcgcccacggcacgcctacagaaatcttacaagacgaacacgttaagcgtgtataccttggggaagacttcagactctgatagggtagaagtttgcgacgttttagcaggagagtacgattctgaacatgaagcaaggtttgcaactcaggcttagccaacaactggcgatgacgccacagctccaacaggcaattcgtctgttgcagttgtcgacgctggaacttcagcaggagctacagcaggcgctggagagtaatccgctgcttgagcaaatcgacactcatgaagaaatcgacacccgcgaaacgcaagacagtgaaacgctggacaccgccgacgcgctcgaacaaaaagagatgccggaagagctgccgctcgatgccagttgggacaccatttacaccgctggtacaccatccggcaccagcggtgactacattgacgacgagctgccggtctatcagggcgaaacgacgcagaccttgcaggattacctgatgtggcaggtcgagctgacaccgttttccgacactgaccgcgctattgctacctctatcgtcgatgccgttgatgacaccggttatctgactgtcccgctggaagatattctcgaaagtatgggcgatgaagagatcgacatcgacgaagttgaagccgtccttaagcggatccaacggtttgatccggtcggtgtggcggcaaaagatctgcgtgactgcctgctgatccaactctcccaattcgataaaaccacgccgtggctggaagaggccagactgatcattagcgatcatctcgatctgttagccaatcacgacttccgcactttaatgcgcgtcacgcgtctgaaagaagatgtgctgaaagaagccgtcaatctgatccagtcgctcgatccgcgccccgggcaatcgatccagactggcgaacctgagtatgtcattccagatgtgctggtgcgtaagcataacggtcactggacggtagaactcaacagtgacagcattccgcgtctgcaaatcaaccagcactacgcctcgatgtgcaataacgcgcgcaatgatggtgacagccagtttatccgcagcaatctgcaagatgccaaatggttgatcaagagtctggaaagccgtaacgatacgctactgcgcgtgagtcgctgtatcgttgaacagcagcaagccttctttgagcaaggcgaagaatatatgaaaccgatggtactggccgatatcgcccaggctgtcgaaatgcatgaatcgacgatatctcgcgtgaccacgcaaaaatacctgcatagtccacgaggcatttttgaactgaagtatttcttttccagtcacgtcaataccgagggcggcggcgaagcttcctccacggcgattcgtgcgctggtgaagaaattaatcgcggcggaaaacccagcgaaaccgttgagcgacagcaagttaacntctgtgctgtcggaacaaggtatcatggtggcacgccgcactgttgcgaagtaccgagagtctttatccattccgccgtcaaaccagcgtaaacagctcgtttgacccaaccgataaggaagacactatgcagctcaacattaccggaaataacgtcgagatcaccgaggcactgcgcgaatttgttacagccaaatttgccaaacttgagcaatattttgaccgaatcaaccaggtctatgttgttctgaaagtggagaaagtcacccacacctcagatgcaacactgcatgtaaacggtggtgaaattcatgccagcgcggaaggtcaggacatgtacgctgccattgatggcttaattgataagctggcacgccagttgaccaaacataaagataaactgaaacaacactaattgtccgggcaattagcatgtgcatggcggcctgttgtgcggcacaacgggccatttgtacggttaatgctccgagcctgttccactgtttgagtgggcaggttcttaggtgaaattatgacaaataatgatacaactctacagcttagcagtgttcttaacagggaatgtacgcgaagccgcgtccactgtcagagcaaaaaacgcgccctggaaatcatcagcgagctggcggcgaaacaacttagcctaccgcctcaggtggtttttgaagctatcctgacgcgggaaaaaatgggcagtaccggtatcggcaatggtattgccattccgcatggcaaactggaagaagatactctgcgtgccgttggcgttttcgttcagctcgaaacgcctatagctttcgatgccatcgacaaccaaccggtggacttactttttgccctgctggtgccggcagaccaaactaaaacgcacctgcatactctgtcgctggtggcgaaacgtctggcggacaaaaccatctgccgccgtttacgcgcagcccagagcgatgaagagctgtatcaaatcattacggataccaaaggtactccggatgaagcgtagttattcggtaatgtctcttttagacgttgtgaggagaaacagtacatggtactgatgatcgtcagcggacgttcaggttcaggtaaatctgtcgccctgcgtgcgctggaagatatgggtttttactgcgtggataaccttcccgtagtgttgttacccgatctggctcgaaccctggccgatcgcgagatttctgccgccgtcagcattgatgttcgtaatatgccggagtcaccagaaatattcgaacaggcgatgagtaacctgcctgacgctttctcaccgcaactactgttcctggatgccgaccgtaataccttaattcgtcgttacagtgacacgcgccgactgcatccgctttccagcaaaaacctgtcgctggaaagtgctatcgacaaagaaagcgatctgctggagcctctgcgttcgcgagcggatctgattgtcgatacctcagaaatgtccgttcacgagctggcagaaatgctgcgtacccgtctgctgggtaaacgtgaacgcgaactgacaatggtctttgagtctttcggcttcaaacacggtatccctatcgatgcagattacgtctttgacgtgcgcttcttgccgaacccgcactgggatccgaaactgcgtccaatgacaggtcttgataagcctgtcgccgcgttcctcgaccgccacacagaagtacacaattttatctaccagacgcgaagctatcttgagctatggttacctatgctggaaaccaacaaccgtagctacttgacggtcgccattggttgtaccggcgggaagcaccgttcggtgtatattgcagagcaactggcagactacttccgctcgcgcggtaaaaacgtccagtcacgccatcgtacgctggaaaaacgtaaaccatgactgtcaagcaaactgttgaaatcacaaacaagctgggcatgcatgcccggcctgcaatgaagctgtttgaattaatgcagggttttgacgctgaagtgctgttacgtaatgacgaaggcaccgaggctgaagccaacagcgttattgcgctgctgatgttggattctgccaaaggacggcagattgaagttgaagcgaccggtccacaggaagaggaagcactggccgccgttatcgccctctttaattctggttttgatgaagattaatcttcatcactttgacatacaactcccttcaaactccccccgacaataagaaaatcacgtactgaaatcgttctcaatcaacgtcaattgtacatttcgtgcgctttttactttcagaagaaccttaagaaaaccttaagaagcattgtttaggtttcgtttaagttaatcgaccatactggagatcgtcagaaaatatttccaggagatggcatgattcgcttatctgaacaaagtcccctgggcaccggaagacatcggaaatgttatgcgcatccggaagatgcccaacgctgtatcaagattgtctaccatcgtggcgatggtggcgataaagagatccgtcgtgagttaaagtactacgcgcatcttggtcgccggttaaaagactggagtggaataccgcgctatcacggtaccgtcgagacggattgcggaaccggttatgtttatgatgtgattgctgattttgacggcaagccctccattacgctgaccgaatttgctgaacaatgccgttacgaagaagacgttgcacaactgcgccaattactgaaacagctgaagcgttatttgcaggataaccgtatcgtgacgatgtcgctgaagccgcagaatatcctctgtcaccgcattagtgagtcagaggttatccccgtcgtctgcgacaacattggtgaaagcacattgattccactggcgacctggtcaaagtggtgttgtctgcgtaagcaagagcggttgtggaaacgatttatcgcccaaccggcgctggctattgccctgcagaaagatctgcaacctcgtgagagcaaaacgctggccctcgnnnnnnnngaagcttaatccagctggtgttgttgcataaacggctcaccgcctaactgatacatctgccgtaaaatccacgcctgacggctgcgcacgtagcccgatggcgcggagactttgaaacgaagtggattaggtaatacagctgccagtaaggcagcttccgatcgggtaagtttgctcgcgggtttgtggaaataacgttgtgccgcagcttcgacgccaaacacaccgtcgccaaattcggcgatattcaggtaaaccgtcaggatacgctttttgctccagacagtttctatccccagcgttaatccggcttccagcccttttcgaacccagctacgcccatcccataaaaagagatttttggctgtctgttgagaaatcgttgaagcaccgcgaatacggttttcattgcgctcattgtgcgccagggctttctcaatggaagcgacatcaaagccccagtgctcaggaaatgtctgatcttctgcggcaatcaccgtcagtcccatccacggcgagatttgatccatactgacccagtcagaatgtgccacgtaacgaaaattaccatgcagccaggcgctgacctgtcgctcgaccattaccgcagagaagggaacaggtgcaacgctaaacaacgcgatgcccccgccccagaaaacggcgaggacaaccattaaccgcagaagaaaacggcgaacgaaactaaacaccgttaagcggcttttactcattcagccagaaccagcacgcgggaaaccagcttatcaatgccgctcgccgcttctgcaatgttctgcgccagcatatatgccggggtggtgacaatcttattgtcttcatcaaccacgatatcatcgacaggacacggcacatgctccgcgcccatctcttccagcacttctgcggtatcgatatcagtaccgatggtcaaacgcagcgggaaatcgannattttcggcagcatcgccggggcaatacacataaaaccaagcggttttccggcctgatgcatcgcttgtgccagcgcctttaattcacggtcaacggtgcattcgcgaccaagactggcaaaattgcttaaattctttgccgcgccaaacccccccggcacaatcaacgcatccagttcagcggcatcggcctgggccagaggacggatttcaccgcgcgttattcgtgccgcttcaatcagcacattgcgcgtttccgtcatcgcttcgccagttaaatgattgataacatcaacctgctgcttatccggtgcaaagcagaccgcctgcgcaccgctgcgtgaaatagctaacaacgtcaacaccgcttcatgaatttcagaaccgtcatagacgccgcatccgctcagaattacgccaattttcttcattatgatcatcctttcgcaattgactgaaacacattaatttttttaataaaaatggtaccgcatcacacatttaactgattcatgtaacaaatcatttaagttttgctatcttaactgcgtgcggcctgaaaaacagtgctgtgcccttgtaactcatcataataatttacggcgcagccaagatttccctggtgttggcgcagtattcgcgcaccccggtctagccggggtcattttttagtggcttttgccacccacgctttcagcacttctacgtcgtgacgccactcttctttcatctcttcaatccattcaccgacgttatcttcccaggcgggaaggtcaggagactgaatttgctgacccagctgttgcagatggcgcaaccccactgaccccgccgcacctttaattttatgtccttcctcaacaatgccttttttatcctgcgccgtcagattcgactccagcacgctgacatagcctggcatcatcttctcaaacaccgctaacccgtcggtgatcagcttcggtcctacaagttcgagatactgttccagcatgggaatatcgagcaatgcttctgatttactgttctcttctgtcgtcaccgtactctcctcatcatcctgggtatcccagaatttcttgatcatcgcggttagcgccggaacagaaagcggcttactcagcacatcatccattccagcattgaggtactcttgtttgtctttcagcacgttagcggttaaggccaccagcggcggtaaatcctctcgcggataacgcttcgtcagttcacgagagatatccagcccggtcatatctggcaactgaatatccagcaacaccaggtcgtattcgcccggtttaaacatctccagcgccgccttgccggtcatggcgacatcaacgctgttacctaatttttccagcacagaacgcgcgacaatcacgttcagttcaatgtcttccaccagcagcacattcagcgccggtaaaggcatatcgtcttcatcaaacgcatcatcgacctcttctgctaccgacggtgcgtggatcgtcaacgtaaaggttgaacctttaccctgttcgctggtaaccgtaatatcgccgcccatatttttcgccagacgacgagaaacggccagaccaataccggtgccggtggcaggtttaccgccatgactgtctttcacctggtaatacatggcgaagattttatccagctcatcctgcggaatgccgataccagaatcttccacttcaaaatgcagcatatcgccttcatcgtagcgcacgcgcacggtaacctggccttgctgggtgaatttgacggcgttactgatgaggttccacaggatctgccgtaaacgcgtcccgtcggtaatgacctgatgcggtaatggcagcgtcggctccaggttaaagcgcaatcctttttgttgcgcctgcaatgcggagagattttccagatcggcaaggaagctggtgaaatcaaccggttgattatcaagctggaccttgcgccgttccatcttatccatgtcgataatatcgttaaagatattccccagcgtgacggccgaaacatggatggtcttgagatatttttcctgctcggcggtgagttcggtatccagcagaatgcggctcaggccgacgataccgttcagcggtgtacgcaattcgtggctgatggtggaaataaacgtcgttttgtcgcggctggcgcgttcaagcgcatcctgataccgcttacgctcggtaatgtcgcgaccaaagcccatcaaaccgtgacgtttacccacgcggtcgtagtacggcactttacgaatttcaaagcaggctttgcgtccgtcgggataatccagccactgctcataggtcagtgacacattatgacggaacactttttcatcggtttcaatgactttcgcagcggcttccggtgagtaaacatcagcaggtttcaggtgaaccagttgtttttcgctttttccggtcagcagctccatcgcgcggttacagccggaaaactctttatcttcgttacgataaaaaaccaggtcgggtgaagcatcaaggaaggaacgtaaaaatgaggattgctgctcgagctgaatttgtgtctcttcgcgctctttgatttcaattttcagttggccgaaggtttcctgcagttctgcttccgctttttcacgaacggcaatttcctgatttagctgggcaatattatcttttaactgaacgttgaggctcaaatcgcgctcgcgcatctcctccagtttttgcaccagccgtgacagacgttgtcgtgactcctccagttgctcgacgaccaccgatagaaagtagaccgcccacggcgtaatcagcaaaccaaagaagatagaacgaataacatcaatgctttcgacctgaccatgcagcaccatggttaccgccatttgtaccacaatggcaagaacgacgagggccagcgccagcaacattgagaagcgcaccagacctaanttcatcatcaggtcaacataatactgcgccagcagacgaatttgcttcattagggaattccttcacgacaacctgccccaataatacccaattctgacagttacgttataaattgtgtgagaaatgcggaattcccctcaacgacctactccgttggaggtagccacggacgtcccagcgccgatccctgtacgccatgttcattcagatagcgatccagctcgaccattcccgtccatcgattttcgcaccacagaggagcaagcagcgtcgggcgacgggcgctggcggaaatgcggtggtagatcacttccggtggcgtatggcgaatcatttctccggcagtgagcgtgtaatcctccagttcaataccgttcaaacgccccgcttcccaggctttcgccataatgctgcctttcacaatatgcagcggatgcagctttatgccgtccacgccggtttcaaccactcgctccagcgtttgcaaacattcagcctgcccttcgccaggcaggccgacaattaagtgagaacacaccttcagcccgcgctgacgtgccagctgggttgtacgctgataacaggcaaaatcatggccgcgattaatgcgatgcagggttttgtcgtgggcggtttgtagccccagctccagccacacttcgtagccctggtccttatattcgcaaagcagatccagcaccgcatccggcacgcagtccgggcgagtaccaacacacaaaccgacaatattggcctggctcaccgcctgctgatacatagaacgcagcacctgaacttccgcaaaggtgctggtatacgcctgaaagtaggccagatagcgtttagcgcggttaactaaattcgcctggtgcgccagttgctcggcaatggaacgatgttgctgcgcttcatcggcaaatgaggcaacattacagaatgtgcagccgccacgcccgatggtaccgtcacggttagggcagctaaaaccgccgtgcagcgtcagcttatgcaccttttgcccataacgacgggtgagatcaccaccaaacatattgactaatttctgtaactgcataatctgatagaccgcgccttgaaaagaggccaaagcctgccatttttagctcaattcggcgatgacttggatcaatcgtcccggcctgcttttatcaactgcataaccaatcaaaattaccgaaatttcatgcataatcacataaatcacttttgcttatcttgtgtcagatttttttatctccttatggattttaggcaaaacagtagcatgaaacgtcattaccaattaaggcagtataaaatgctggttttctcgtcagttcaaggcaggataagggttaacacgcctttatgacagtcagaaattggctgtttctctaacgacgccccttttagccttaattagaaaatccattttaatttcagtcaattaataaagaattttgcgctaaagcacatttctgtaccaataagcttgccatttgacctgtatcagctttcccgataagttggaaatccgctggaagctttctggatgagcagcctgctcatcatatttatgcagtaattgagatcccctcttcaccgtattaaccgatgcgaaaaggacaacaagggggcgaatgcgaggcgcgcgtatgacacgcaaaccccgtcgccacgctctttctgtgcccgtgcgcagcggttcggaagtggggttcccgcagagcctgggggaggttcacgatatgttgtacgataaatcccttgagagggataactgtggtttcggcctgatcgcccacatagaaggcgaacctagccacaaggtagtgcgtactgcaatacacgcactggcccgcatgcagcaccgtggcgcgattctcgccgatggtaaaaccggtgacggttgcggcttgctgttacaaaaaccggatcgcttttttcgcatcgttgcgcaggagcgcggctggcgtttagcgaaaaactacgccgtcgggatgctcttcctgaataaagatcctgaactcgccgctgccgcacgccgcatcgttgaagaagagctgcaacgcgaaaccttgtcgattgtgggctggcgtgatgtccccactaacgaaggcgtgctgggtgaaatcgccctctcctctctgccacgcattgagcaaatttttgtgaacgccccggcaggctggcgtccgcgcgatatggagcgccgtctgtttatcgcccgccgccgcattgaaaagcgtctcgaagccgacaaagacttctacgtctgtagcctgtcgaatctggtgaacatctataaaggtctgtgtatgccggcggatctgccgcgctnttatctagatcttgcggacctgcgtctggaatcggccatttgcctgttccaccagcgcttctccactaacaccgtaccgcgctggccgctggcgcaaccgttccgctacctggcgcataacggtgaaatcaacaccatcaccggtaaccgccaatgggcgcgtgcgcgtacttataaattccagacaccgcttatccctgacctgcacgacgccgcaccgttcgtcaacgaaaccggctctgactccagttcgatggataacatgctggaactgctgctggcaggcgggatggatatcatccgcgccatgcgtctattagtaccacccgcctggcagaacaacccggatatggacccggaactgcgtgccttctttgactttaactccatgcatatggagccgtgggatggcccggcgggcatcgtgatgtctgacggtcgttttgctgcctgtaacntcgaccgtaacggtctgcgtccggcgcgctacgtcatcaccaaagataagctcatcacctgcgcctctgaagtcggtatctgggattaccagcctgacgaagtggtcgaaaaaggccgcgtcgggccaggcgaactgatggtaatcgacactcgcagtgggcgtattctgcactcggcagaaaccgatgacgatctgaaaagccgccacccttataaagagtggatggagaaaaacgtccgccgactggtaccgtttgaagatctgcccgatgaagaagtgggtagccgcgaactggacgacgacacgcttgccagctaccagaaacagtttaactacagcgcggaagagctggactccgtaattcgcgtactgggcgaaaacggtcaggaagcggtcggttcgatgggcgatgataccccattcgccgtgctctccagtcagccgcgcattatttacgactacttccgccagcagtttgcccaggtgactaacccgccaatcgacccgctgcgtgaagcgcatgttatgtcgctcgccaccagtatcggtcgtgaaatgaacgtcttttgcgaagcagagggccaggcgcaccgtttaagctttaaatcgccgattctgctctactccgatttcaaacagctcacgacgatgaaagaggagcactaccgcgcagatacgctggatatcacctttgacgtcaccaaaaccacgctcgaagcgacggtcaaagagctgtgcgacaaagccgaaaaaatggtacgtagcggcaccgtgctgctggtgctctccgaccggaatatcgctaaagatcgcctgccggttccggctccaatggcggttggcgcgatccagacccgtctggtcgatcaaagcctgcgttgcgatgccaacatcatcgtcgaaaccgccagcgcccgcgatccgcaccacttcgccgtgttgctgggtttcggcgcgacggctatttatccgtaccttgcctatgaaacgctgggccgcctggtagacacccacgcgattgccaaagattatcgtaccgtgatgctcaactaccgtaacggcatcaacaaaggcttgtacaaaatcatgtccaaaatgggcatctccaccatcgcctcttaccgctgctcgaaactgtttgaagcggtcggtctgcacaatgatgtagtgggcctgtgcttccagggggcggtcagccgcattgggggggcgagctttgaagacttccagcaggatctgctgaatctctcgaaacgagcctggctggcgcgcaagcccatcagccagggcggcctgctgaaatacgtccacggcggcgaataccacgcctacaacccggacgtggtgcgcacgctgcaacaggcggtacagagcggcgagtatagcgactatcaggaatacgcgaagctggttaatgagcgtccggcaaccacgctgcgcgatctgctggcaattacgccgggtgaaaacgcggtcaacattgccgatgttgaaccggcaagcgaactgtttaaacgcttcgataccgcggcgatgtctatcggcgcgttaagcccggaagcccacgaggcgctggcggaagcgatgaacagcatcggcggaaactcgaactccggtgaaggtggtgaagacccggcgcgctacggcaccaacaaagtgtcgcgcatcaagcaggtggcttccggtcgctttggggttactccggcgtatctggtcaatgccgacgtcattcagattaaagtcgcccagggcgcgaagccgggcgaaggcggtcagttgccgggcgacaaagtcactccttacattgccaaactgcgctattcggtgccgggcgtgacgctgatctccccgccgccgcaccacgatatntactctatcgaagacttagcgcagctcattttcgacctcaagcaggttaacccgaaagcgatgatctccgtgaagctggtttccgaaccgggcgttggcaccatcgccaccggtgtggcgaaagcttatgccgatttaatcaccatcgcaggctatgacggcggcaccggcgcaagtccgctttcatcggtgaaatacgcaggctgtccgtgggagctgggacttgttgaaacacaacaggcgctggttgccaacggcttgcgtcataaaatccgtttgcaggtcgatggcggcctgaaaacgggtgtcgatatcatcaaagcggcgattctcggcgcagaaagcttcggcttcggcactggcccaatggtcgcgctcggctgtaaatatctgcgtatttgccacctgaacaactgcgcaacgggtgtggcaactcaggatgacaaactgcgtaagaatcactatcacggcctgccgttcaaggtgacgaattactttgagtttatcgcccgtgaaacccgcgagctgatggcacagcttggcgtaacacgtctggtggatctgattggtcgcaccgacctgctgaaagagctggacggtttcaccgccaaacagcagaaactggcgctgtcgaagctgctggagaccgccgaaccgcatccaggtaaggcactctactgcaccgaaaccaacccgccgtttgataacggcctgctgaacgcgcagttgctgcaacaggcgaaaccgtttgtcgatgagcgccagagcaaaaccttctggttcgatatccgcaacaccgaccgctctgtcggcgcgtcgctttcaggctatatcgcccanacgcacggcgatcaggggctggcagccgatccgattaaagcgtacttcaacggcaccgcaggccagagcttcggcgtgtggaacgcgggcggcgtggaactgtacctgaccggtgatgccaacgactatgtcggtaaaggcatggcgggcggcttaatcgccattcgtcctccggttggttccgccttccgcagccatgaagcaagtattatcggcaacacctgcctgtatggagcgacgggtggtcgtctgtatgccgcaggccgcgcgggtgaacgtttcggcgtgcgtaactccggtgcaatcaccgtggtagaaggcattggcgacaacggctgtgaatatatgacgggcggtatcgtctgtattctgggtaaaaccggcgttaacttcggtgcgggtatgaccggcggcttcgcttacgttctcgatgaaagcggcgatttccgcaaacgcgttaacccggaactggtggaagtattaagcgttgacgatttggcgatccatgaagagcatctgcgtggtcttatcaccgagcatgtgcagcataccggttcccagcgtggtgaagagattctggcgaactggtcaaccttcgccactaaatttgcgctggttaaaccgaagtccagtgatgtcaaagcactgctgggtcatcgtagtcgtagcgcagcagagttgcgcgtgcaggcgcagtaaggggtagcaacaatgagtcagaatgtttatcaatttatcgacctgcagcgcgttgatccgccaaagaaaccgctgaagatccgcaaaattgagtttgttgaaatttacgagccgttttccgaaggccaggccaaagcgcaggctgaccgctgcctgtcgtgcggcaacccatactgcgagtggaaatgcccggtacacaactacatcccgaactggctgaagctcgccaacgaggggcgtatttttgaagcggcagaactgtcgcaccagaccaacactctgccggaagtatgcggacgtgtctgcccgcaagaccgtctgtgcgaaggttcctgcaccctgaacgatgagtttggcgcggtgaccatcggcaacattgagcgttatatcaatgataaagcgttcgaaatgggctggcgtccggatatgtccggcgtgaaacagaccggtaaaaaagtggcgattatcggcgcaggtccggcaggtctggcgtgtgcagatgtcctgacgcgcaacggcgtacaagcggtcgtcttcgaccgtcacccggaaattggcggcttgctgaccttcggtattccggctttcaaactggaaaaagaggtaatgacgcgccgccgtgaaatcttcaccggcatgggtattgaattcaaactcaataccgaagtgggccgcgacgtacagntggacgatctgctgagtgattacgatgccgtgttccttggcgtcgggacttatcagtcaatgcgcggcgggctggaaaacgaagacgccgatggcgtgtacgcagcgctgccgttccttatcgccaacaccaaacagttaatgggctttggcgaaactcgtgaagaaccgttcgtcagcatggaaggcaaacgcgtggtagtacttggcggtggcgataccgcaatggactgcgtgcgcacgtctgtacgccagggggcaaagcacgttacctgtgcctatcgtcgtgatgaagagaacatgccgggttcccgccgcgaagtgaaaaacgcgcgggaagaaggtgtagagttcaaattcaatgtccagccactgggaattgaagtgaacggtaacggcaaagtcagcggcgtaaaaatggtgcgtactgaaatgggcgaaccggatgccaaaggccgtcgccgcgcggagatcgtggcaggttccgaacatatcgttccagcagatgcggtgatcatggcgtttggtttccgtccacacagcatggaatggctggcaaaacacagcgtcgagctggattcgcaaggccgcatcatcgccccggaaggcagcgacaacgctttccagaccagcaacccgaaaatctttgctggyggcgatatcgtccgtggttccgatctggtcgttaccgctattgccgaaggtcgtaaggcggcagacggcattatgaactggctggaagtttaagctctgtcccagcgccgcctcctcagaaaagagtcggcgctgaaattctcctttcgttctggaaagcgcctcgcataatctgaagaaaaccaatgtaatacgcacatctggattgttaccggcagatgcccggcgtatagctgattccattattcaacactgcgccatataaagggaaagataatggaatcgctctcagagagaacctcaacaggctaccagcaaatccacgacggtattattcacctggtcgatagcgcccggacggaaacggtacgtagcgttaacgcgctgatgaccgcgacatactgggaaattggccgacgaattgtcgaatttgaacaaggtggcgaggccagggctgcgtatggtgcgcagctaatcaagcgactatcaaaggatttaagtctaaggtataagcgtgggttctctgcaaaaaacttacgccaaatgaggcttttttacctcttttttcaacatgttgaaattcgccagacagtgtctggcgaattaacaccattgccctggtccacttacgtccgtttactttccgttaaaaacgctgacacccgcagcttttatgaaaaagagacgctccgctgtggctggtctgttcgccagctagaacggcaaattgcgacccaattttatgagcgaacactgctgtcacatgacaaatcagccatgctgcaacaacacgctcctgccgagacgcatattcttccgcaacaggcgatacgcgatccctttgtgctcgaatttctggaattgaaagatgaatactcagaatccgattttgaggaggcgctgatcaaccacctgatggatttcatgctggaacttggggatgattttgcctttgttggtcggcagcgaaggttacgcattgatgacaactggtttcgtgtcgatctgctgtttttccaccgccgtttacgctgcctgctaatcgtcgatctaaaagtgggcaaattcagctatagcgatgccggacagatgaatatgtatctcaactacgccaaagagcactggacgctaccggatgaaaatccgcccatcggtctggttctctgtgcagagaaaggagtcggagaagcgcattatgcactggctggtttgcctaacaccgttctggcgagtgaatataagatgcaactacctgatgaaaaacgactcgcggatgaactcgttcgaacacaggcggtgctagaagaaggctatagactccgttaatttcagcggtttcgaattctgcagacactgtctgcagaatctttaaaacgaactaagttttaagccattaaatcagccttaaccttcaccaccacctttttaatctcaccaggttcgccgacaacgcatcctggtttatgcggttctcccggcataaacacggcgaacattcccggttttaagttgatggtttgctcgttttcaatggcgctgcaaagctggtaatcatcttcatggtggaactcttcacactggcgcgcagtgcctgccgtgccaaacagaatccgttcctcaccttttaataacagctggatatcaatgtattgctcgtgcaattccgcttttttctcgacgggcgattgagtgttaaacgtcatgacantcataaaaatattgtcgccctgtaattcgtaacgacccggcgctttttcttgcggtctggcagctaatgccagcgttaacgcgtcctgtaacgcaggatgtaacccagcagacggtaatgactgtacttcacccatcatcataatttttctccctgggccaacagcgcagccccaagtaaacctgcatcatggcggtagtgcgccgccagtaaatcaacatgaaatgccgctggctcctgcgccagatacgtttccaccagcgccagatacccttctgccagaccaacgctgccaccgaccaccacgcactgacaatcagttgtggctttaatatcagcgatcagccttgccagcacatgtgcggagcggtgaatcagctgctgcgcctgctcgtcgccctgcccggcgcgcatgaaaatagttttcgcatccgcgccagccaactccccctgcgctgccgctgcaataccgcgaccagaagcaatcgcttccacgcaacctgtgcgtccacagccgcagactgggccgtgtggatcggcaagcgtatgcccgatgtgccccgccagaccgccagggccggtaagcagtttgccgccgctcactacaccgccgccgacgccagtggaaacggtgataaacaccatatcggttatatcgccttccagcgcctgatactctgcccatgctgcggcctgggcgtcgttaatggcaatggtcggcaaatcggtaagttgctccagcgttttgactaacggaaagtgtagcaatccaccaagattatgcggattcagcgccagcaaactgccgtcgcgaataattccggttgaagcgatggcaacccgctgcgcatgagcttgcaacggagagactaatgcggataaggcatcacgcaaggcttctggtgtctggctggctggcgtaggaagttcacgacgatcgcggatctgcccgtcagcgccaatcagcgcggcggcaagtttagtaccgccgatatcaatcgccagtgtggtcatagcaccgcctttttcatcgctgtgttgtaccactgacaaatgtgttcaagacgcgtaatggcagaaccgaccgtcaccgcccacgcgccgtggcgcatcgcatcagccgcctgagcaggcgtgttgtaacgcccttcggcaatcacccgacatccggcgtcgctcaaccttttcaccagcgtcagatccggctcttctggcgtttcaggcgtggtatagccagaaagcgtagtgccaataatttcggctcccagcttttggcatgccaggccgtcttccggcgttgagcagtcggtcatcgccagtaaaccgtgatgatgaatacgtgccagcagcgtttcaacaggcaccggacgcgggcggtcggtgccgtcaatggcgataatgtccgcgcccgcctgcgccagcgcatcgacatcttcaatataggccgtgatgcgtaccggagaatcctccagatcgcgtttcacaattccaataatcggcacgctcaccaccgcacgcgtggcttgcagatttgccacaccttcgatgcgaatggcaaccgcgcccgcctgctctgccgctaatgccatggctgcgacgatttcgggtttatcgagcgggctgtccggaaccggctggcaggagacaatcaggccaccgttagcagcgattttttgatccagttgtgcaagtaacgacatacatcttcccttagcgaaaggcccgatacagagaccgggcaacaggattaacttttggttttgactaaatcgtttttggcgctgccaaacggcacggcaccgctaaatggtttgccgtcgatagcgtcatgagtacgcaacgcttccgggcgcagccaacgctgaacacgagaaggcatatccagaccaatcagcaggatcaccacaaatgtcagactgaacgagagcgatgccagcgcagtacccagatccagacgttgagcgatcaacgcgccgatgattggggccagtgcgccacccaatgcgccaacgttataggtaaagcccaggcccgctgcacgctggtcggtatcgaaataaccgccaatcagtttcggtaagatcccggcgatcccttgtccaagcatttgctggaagaacagtaacagaccgagcacccagacgtttgcaccgccaatagcaaataccggaataatcagcagctgcgaggccaacagactacaaacgtacgctttgcgggttcccagccagtcaccgaggaagccaccgacgcagcaccccaccgccgcgccaaagccactaaagaacagcacattggcgacagtatgagggttataagccagatcggttttcagatacgttggcagcagcgcctgaatcggccatgagtagaggaaagcaaacaacacgaccaccatcagcattacgccagttggccagcgtttgcccgtactctgcaccataaagctgataaagattgcggtgcataacagcccaagaacagcgacgatcgcggcattttgcaggttaccggcgaagcagaaccacagcgcagtagccgccgccagtgtcattacgatattggcaatgcgatgttcaccacggtagagaatatccaccattgtgcgtactggtgctttacctgcgtgtttctctttccagtcttctgcttccgggatgtttttacgcagccagagagcaaagatgattggcaaaatgccgataaagaacagcgcacgccagccccagaccggaaccaccaggctgtagacctgagcggcaacgacggcccctacagagaagcctgaaatcagaaagccactggctttgttacgcagatgttttggccagctttcaatgacataggtggcgctggaaccgtattcacccgccatccccatgccgatgaccagacgagcgataaacatggtgatgtagcctggcgcaaagccgcatgccagcgtcccggccgagaagagaacgatgctggtgaccattgccagacgacgcccgtagcggtcacccatagcgccgagcatcaggccgccgaaccagcgagagataaaggctgcggagatcagacttgccgcctgcaccgtcgtcagcccgaattcaccttgtacttcggtgagtaccagggcgattaaaacgaaatcaaaaccgtcaagcagatatcccaaccaggcagcggaaaatgcccgccattgtgcacgattgagatggcgataccacgggatattctgggttgtagtactcattgtgagtctcccgcggtgggcgatgcccacacgctttggtatgaaaattgtagggtacagatgcgtttatttcccctcacccggtaggggcgagcgaggggaaacaactcacccgcgctcttgcatcaactgctgggccagcgccttcagttctggcagatatttttcatctaccggaccaaacggtttgcggcacagcggcacagaaacgacatccatataatgcagaacagttttcaggccgcggaatacacccgttttgatcagtaaatcaatgactttgttgcattcagtttgcagtttctgcgcggtctggatatcgccttctttcagcgccttaacgatcccctgatagcgccagcccatgatgttgtaggtactaccgataccaccatcagcgcccgccagcaggccagaggcgaagatttcgtcgtanccgttatagagcaccagatcaggatgttcacgacggatctgctccatctgatagagatcgccagaggtctgtttcagcgcacctacgccaggcaatgtaacaagtgtgttgatctgatccagggtcagttttaccccactcagggctggaatgttgtacaccaccatcggcaaaccatccgccgaatcaataattgcccgatagtgatcgcagtgttcttcaaagctgaaaggatagtagaacggcgtgacggcggagacggcatcgaagccataacgtttagccgatgccgcaagttgttggctttcggcggtgctgacgcaaccgacgtgggcgatgagtttaatcttacctttcgcctcttcggcgacgatttccagtacctgttcacgctcggaaaggctttgtacaaaggcttcgccggtcgaaccacccacgtataaaccgtcaatgccctgctgaatattgaactgaaccaggcggcgcagactcgctttatccagtgcttgttgttgatcaaaaggagtcaggagtgcagccattacgccacgtaaattcgttgccataaatacctctgaagtgatgcttgtctgataaacgatatacctttatacctgttataccagatcaattaagcaacaccccatacagaaagcttataatgcgatctgcttcactaaagtggcattatttctttttgttggtggtctgaccgaaggcgtgccaggtagcagagacgctgttnagatgcgattgcaacgcacgatcggcttngtcaggatcgtggcggcggatcgcgtcaacgatcgcaatatgctgttgatagctaacgttgttatgctcgtgcagagcctgatcagccacggttggacgtgcggcgatcagccagtcgagcagggcaacgtggatcgccatgaagattgggttaccggggatctccgccagcacgcggtggaaatcaacgtctgagcgaatgaatgccgcgttgttatccagcgactgactgttgatttccagtgcttttgccagcaaatcgatttgctcatcggtggcgtgttcagccgcatagcgcaccaggctggattcaaagaacagacgtaattgttcgaaatgggcaatcccaccaggatgagaaaggaaatntttcgccatgccggaaagctcgccgatgatggtgtccgcagaaggacgtgagacgcgggcacgttcgccgttgtttatttgcaccagacctttgcgttttaacgctgccagcgcttcacgcaccgaaggacgcccgacgttaaagaacgccatcagttcgcgttcagacggtaattgttcaccttcgccaaattcacgacggcggatcatctgttccagctcttcttccaccatttcggagagttttttacgcgccagcgggcggctacgcaagttgcgaccaattgcaggtgaagaatcttcggtttgcgaatcaaatgcgttcataaggcccattctgtaaggtcagtgtgattaacatcatcagtgacatcctatcacaggattgaaagtaggggaaaatggcaggtttttctctttgtgcctcatcattaccataattaacggaataattaactattgcgaaaaattaatgtaacgcagataaaaacatcccgtttgaattatttataagactattcacgagcattatgaatattatgaatgtgttcttacaaaataatcataagcgcatannnnttaatgaaaaatcacctcacctacaattaaaaacacgacatccgcaccataaatagacttgcaaaaaatataacatcattgttttcaatctgccgtttatgggattgacccttttcttttgacacggagttcaacaatgttcggcataattatatctgtcatcgtattaattacgatgggctatttgatcctgaaaaactacaaacctcaggtggtgctggctgcnggtatcttcctgatgatgtgcggtgtctggttagggttcggtggtgtactcgatcccgccaaaagcagcggctacttgatcgtcgatatttataatgaaatcctgcgcatgctgtccaaccgcattgccggattggggctgtcgattatggcggtgggcggttatgcccgctacatggagcgcacaggagccagtcgcgcgatggtgagcttgttaagccgcccgttaaaactcattcgctcgccgtatattattctgtcggcaacttacgtcatcggccaaatcatggcgcagtttattaccagcgcctccggcctgggtatgttgctgatggtcaccttatttccgacactggtgagtctgggagtaagccgtctctctgcggtggcggttatcgcaaccacaatgtccattgagtgggggattctggaaacgaactccatttttgcagcccaggtagcgggaatgaaaattgccacttacttcttccactaccagcttccggtcgcctcttgcgtcattatctcggtggcgatctcccactttttcgtgcaacgcgcttttgacaaaaaagataaaaatatcaatcacgaacaggcagagcaaaaagctctcgataatgtcccgccgctctattacgccattttacctgtgatgccgttaatcctgatgctcggctcgctattccttgcccacatcgggctgatgcagtcagaactgcatctggtggtggtgatgttactgagtttgacgntgtttgttgagttcttccgcaagcataacttgcgcgaaacaatggacgatgtgcaggcgttttttgacggcatgggtacgcagtttgccaacgtggtaacgctggtggtcgcgggtgaaatatttgcgaaaggcttaacgacgattggcactgtcgatgcggttatcaggggtgcggagcattctggtctgggcggtattggcgtgatgattattatggcgctggtcattgccatttgtgccattgtgatgggctctggcaatgcgccgtttatgtcatttgccagtcttattccgaatatctcagccggactacatgtaccagcggttgtaatgattatgccgatgcattttgccacgacgctagcgcgcggtttcgccgattactgcggtggtggtcgttacgtcaggaattgcaggcgtttcgccttttgcggtggtgaagcggacagcgatccccatggcagtcggtttcgtggtgaatatgattgccacaatcacgctattttattaagtcattaaaagacaaaacaggccgccagggcctgtttttgtattacttcacaacgcgtaatgccggtcgaccaccgcgtggtggctgcggtggttcatcgtcaggatgagtgtcatcatcgtgatctggcttgtcgccatcaataaccgacataacggtttcgttgtctgccgatgcctcttcatcattcatgatgctggtatcttcatcgtaggcagcttcaggctcaaacatcgtgcctgcgccattttcacgggcgtagatagccagcacggcagccagcggcacagaaacctgacgcggaatgccaccaaagcgcgcgttaaagcgcacctcatcattcgccagttccagattgccgacagcacgcggcgcaatgttgagtacgatttgcccgtcacgcgcatattccataggaacctgcacgccagggagcgtcacatccaccaccaggtgcggcgtgagctggttatccagcaaccactcatagaatgcacgcagcagatagggacgacgtggtgttagctgtgacaaatccatacagattaactccggcccagacgcatttcacgttctgcttcagttaaagaagcaaggaaagagtcacgctcaaagacgcgggtcatatagcctttcagctctttcgcacccgggccgctgaactcgatacccagttgcggcagacgccacagcagcggagcaaggtagcaatcgaccaggctgaactcatcgctcaggaagtacggcttctgaccgaagaccggcgcaatcgccagcagttcttcgcgcagttgcttacgtgcggcatctgcttcagaagctgaaccgttgatgatggtgttcatcagcgtgtaccagtctttttcgatgcgatgcatgtacaaacggctttcaccgcgagctaccgggtaaacaggcatcagtggcggatgcgggaaacgctcatccagatattccataatgatgcgagattcccacagggtcagctcacgatccaccagggtcggaacgctctgattcgggttgaggtcaatcagatcctgaggcggattgtccttttccacgtgttcgatctcgaaacttacacctttctcagccagcacaatgcggacctgatggctatagatgtcagtaggaccggaaaacagcgtcattaccgaacgtttgttggcagcgacagccatgaaaacctccaggtatagtcagaatttttactgctaccagccaccaggtggccagtcagaagttgtgttacccagtaaggaacgactctctttgttcgaaaatcaaacaaaaaatgagcaatacccgacatttgggcagaaaattggatgatagtttaccagattttgcgacctttgtggtgagtcgatgccggaaatggggaaaaagagatgcgctttagtctgaaatagttgacttagtcccttattggcgatgtggtttttgttttgcctgtctgtcagacggcagcaaaaagcaactttccattttttacgctgattcagaatttaaccataaaaaaacccgccgaagcgggttttttcgcaaattgttttctgccggagcagaagccaattaacgtttggagaactgcggacgacgacgtgctttacgcagaccgactttcttacgttcaacctgacgagcgtcacgagtaacgaagccagctttacgcagttcagaacgcagggactcgtcgtattccatcagagcgcgggtgataccgtgacggatcgcaccagcctgaccagagataccaccacctttaacggtgatgtacaggtccagtttctcaaccatgtcgaccagttccagcggctgacgaactaccatgcgagcagtttcacgaccgaagtactgttccagagaacgttggttgattacgattttaccgttgcccggtttgatgaaaacgcgagctgcggaacttttgcggcgaccagtgccgtagtattgattttcagccattgcctataatcccgattagatgtcaagaacttgcggttgctgtgccgcgtggttgtgctcgttacccgcgtaaactttcagtttacggaacatagcacgacccagcgggccttttggcaacatgcctttaaccgcgatttcaatcacacgctcaggacggcgagcaatcatctcttcaaaggtcgcttgtttgataccaccgatgtggccggtgtggtgatagtacactttgtcagtacgcttgttgccggttacagcaactttgtcagcgttcagaacgatgatgtaatcaccggtatctacgtgcggagtgtattccgctttgtgcttaccgcgcaggcgacgagccagttcagtagccagacggcccagagttttaccggtcgcgtcaacaacataccagtcgcgttttacggtttctggtttagctgtaaaagttttcattaaaagcttacccaataaatagttacacgttggtgaacacccaaacgtcttcaattgttgaggttcacacgacaaagtccggcaaacctaccccttcgaatagcctatgccagcacacaaaaagttttgggaaaaaaactttcttgtaacgtggggtcgcaggattatagagaagtcggggtcaaagatcgacccctttttgtgatttgtggcaggttttaacccgctaaatgctcgcgcttcagatactcttcgctttgcatctcttgcagacgtgacaggcaacgctggaactcaaacttcagccgatcgccctgataaatttcatacagcggcacttctgcactcaccactaatttgacatggcgctcgtaaaactcatccaccagcgcaataaagcgccgcgcttcgctctccatcaaccgcgtcataactggtacatcaaacaacatgaccgtatgaaagagacgtgagagcgcaatatagtcatgctgactgcgggcgtcgacgcacagcgtagtaaaagagaccgccagcgtctggttctcgacgcccattgtcgctaatggccgatggttgatttctaacgtcggtgaattttctcgtttcccccccgccagcgccaaccatagtttatccatttgcgcccgggtttcatcgtggagtggcgaaagccacagatgcgcctgagtgagtgtacgcagacgataatcaacaccagcgtccacgttcattacatcacaatgctgtttaatggcatcgattgcaggcagaaaacgcgcacgttgcaagccatttcgataaagttcgtccggcggaatatttgacgtcgctaccagggtaataccgcgggcgaacagggctttcatcaggccgccaagtagcatggcatcggtaatatcagagacaaaaaattcgtcaaaacagagcacgtcagtttctgctctaaagcgatcagcaataatttccagcggatcggtctgcccctgtaaggcagttagctcttcatgcacccgcagcataaaacggtgaaagtgcaggcgctgtttccgctctcccggcaggctttgatagaaaaggtccatcagccaggttttcccgcgtcctacaccgccccacatatataagccacgcactggcgtatgctttgtgtcttcccgtttaccccacagcttaccgacccgcgccattagcccactcgtcctgggggctggtggcgtgctattgatgagttcctgataaataatttccaagcggctgacggcctctttttgaacgtcgtcgggttgatggctgccttcattgagcgccttcaggtattgcgatgttggagtaacgctttgcatgatcttattgttattccttgaataatcggtgcgccgttgttcacggttgacgaaaaaaaggccgttctacactacgcgatatgcagtcgggattccacttctgtggaattaacggttatagtggcataatcagccgcaggcatggagcctgaagccaacaccctacggaaacaaaagacaacgggagatgttcatgacctgggaatatgcgctaattgggttagtcgtcggcatcattattggtgctgtggccatgcgttttggtaatcgtaaactacgccagcaacaggcgttgcagtacgaactggaaaagaataaagctgaactggacgagtatcgcgaagagctggttagccactttgcccgcagcgcggaattactggataccatggcgcacgactatcgccagctgtatcagcacatggcgaaaagctccagcagcctgctgccggaactgtctgctgaagcaaacccgttccgtaatcgtctggcagagtctgaagccagcaacgatcaggcaccggtgcagatgcctcgcgactattctgaaggcgcatccggcctgctgcgtactggcgcgaagcgcgactaatttatttttcgggcgcagccattgcgccctcctcttctctccctccccgactatcatttaatctggtgtctcattgttagccgtctgaaaattcaataacatcaaactgttttgaatctcttttcttatcattcaggtacgagagcaggaataatgaaaaaacaaacccagctgttgagtgcattagcgttaagtgtcgggttaactctctcggcgtcatttcaggccgttgcgtcgatcccaggccaggttgccgatcaggcccccctccccagtctggctccaatgctggaaaaagtgcttccggcagtggtgagcgtacgggtggaaggaacggccagtcagggacagaaaatcccggaagaattcaaaaagttttttggtgatgatttaccggatcaacctgcacaacccttcnaaggtttaggctccggtgtcatcatcaacgccagtaaaggctatgtgctgaccaacaaccatgtgattaatcaggcacagaaaatcagtattcagctcaatgatgggcgcgagtttgatgcaaaactgattggtagcgatgaccagagcgatatcgccctgttgcaaattcaaaacccgagcaaattaacgcaaatcgctattgccgactccgataaattgcgcgtcggtgattttgccgtggcggtcggtaacccatttggccttgggcaaaccgccacctctggcattgtttccgcattaggacgcagcgggttgaatcttgaaggtctggaaaactttatccagacagatgcttccattaaccgcggtaactccggcggtgcactgttaaaccttaacggtgagttaattggcatcaacactgcaatccttgcgcctggcggcgggagcgtcggaattggatttgccatccccagtaatatggcgcgaacactggcgcagcagcttatcgactttggtgaaatcaaacgcggtttgttaggcatcaaaggcaccgagatgagtgccgatatcgccaaagccttcaaccttgacgtgcagcgtggcgcgtttgtcagcgaagtgttgccaggttctggctcggcgaaagcgggcgtcaangcgggcgatattattaccagcctcaacggcaaaccgctgaatagctttgctgagttgcgctctcgtatcgcgaccaccgagccgggcacgaaagtgaagcttggcctgctgcgtaacggcaaaccactggaagtagaagtgacgctcgataccagcacctcttcgtcggccagcgctgaaatgatcacgccagcgctggaaggtgcaacgttgagcgatggtcagctaaaagatggcggcaaaggtattaaaatcgatgaagttgtcaaaggaagcccagctgctcaggctggcttgcaaaaagacgatgtgatcattggcgtcaaccgcgatcgggtgaactcgattgctgaaatgcgtaaagtgctggcggcaaaaccggccatcatcgccctgcaaattgtacgcggcaatgaaagcatctatctgctgatgcgttaatgtcgtaaaccgggcatcaggctgacgtgtgatgtccggttaactcgtggtatgctgctgccgttcccttttttaatgacgcctccatcatgtttgtgaagctcttacgttccgttgcgattggattaattgtcggcgctattctgctggttgccatgccttcgctgcgcagccttaacccgctttccactccgcaatttgacagtaccgatgagacgcctgccagttataatctggcggttcgccgcgccgcgccagcggtggttaacgtttacaaccgtggtttgaacaccaactctcacaaccagcttgagatccgcaccctgggatccggtgtaatcatggatcaacgcggttatatcatcaccaataaacacgtcatcaacgacgccgatcagatcatcgtcgccttacaggatggacgtgtatttgaagcattgctggtgggatctgactctctaaccgatctggcggtacttaaaattaatgccactggcggtttacctaccattccaattaatgcacgtcgcgtaccgcacattggcgacgtggtactggcgatcggtaacccgtacaacntcgggcagaccattacccaggggattattagtgctacgggtcgaatcggtctgaacccgaccgggcggcaaaacttcctacaaaccgatgcttccattaaccacggtaactctggcggngcgctggtgaactcgctgggcgaactgatgggcattaacacgctgtcgtttgataagagtaacgatggcgaaacgccggaaggtatcggctttgcgattcctttccagttagcaaccaaaattatggataagctgatccgcgatggtcgcgtgatccgcggctacattggtatcggcggacgcgagatcgcaccactgcacgcgcagggcggtggtatagatcaactgcaagggatcgtggttaatgaagtgtcacctgacggcccggcggcgaatgcgggtattcaggtcaacgatctgattatttcggtggataacaaaccggccatctctgctctggagacgatggatcaggtggcagaaattcgccctggttcggtgatcccggttgtagtgatgcgtgatgataagcagttaacgctgcaggtcaccattcaggaatatccggcaaccaattaaggccagcgtgaaagacaaaaaaaccggagtctgtgctccggttttttattatccgctaatcaattacttattaacgaactcttcgcccagggcgatatctttcttgagcgtatccagcataccttccagagcgttctgttcaaatgcgctcagggtaccgatagatttacgctcttccacgccgtttttacccagcagaagcggctgagagaagaaacgggcgtactgaccgtcgccttcaacgtaggcacattcgacaacgccttgttcgccctgcagtgcgcgaaccagagacaggccaaaacgtgcagcagcctggcccatagacagggttgccgacccgccaccggctttcgcttcaaccacctcagtacccgcgttctggatacgtttggtcagatcagccacttcctgctcggtaaaactaacgccaggaacctgtgacaacagcggcagaatggtaacaccagagtgaccgccaataaccggcacttcaacttcgcctggctgtttgcctttcagttccgcaacaaaggtgttggaacgaatgatatccagcgtggtaacgccgaacagtttgtttttgtcataaacaccggcttttttcagcacttcagcagcaatcgcaactgtggtgttaaccgggttagtgataataccaatgcacgctttcgggcaggttttcgcaacttgctgtaccaggtttttcacgatgccggcgttaacattaaacaggtcggaacgatccatacccggtttacgcgctacacctgcagagataagaacgacatctgcgccttccagcgccggagtcgcatcttcaccagaaaaacctttgattttcacagcagtagggatatggctcagatcgacggccacaccgggagtcactggagcgatatcatacagagagagttctgaacctgaaggcagttgggtttttaacagtagtgcaagcgcctggccaataccgccagcagcgccgaggactgcgactttcatcctaaactccttattatattgataaactaagatatgttgctccgctgccgcgaccttaatccacaaaattgccgtttacaatgaccacatctcaagaatgtgtagtcacgcaagtttagcgtttatgcatttaattgccgtaatcaggaacctaagttacgtaattaacaatcgcttatgcattagcgcaacattccaacaggtggtgacaatataccctaccgttcagccaaaacaacatcaatttgataacaattaatttacttttaagcagaatttgcatgccgtgacgcaggcatgtttctcaataacgaaatttgataaaatcccgctctttcataacattatttcagccttcttcagggctgactgtttgcataaaaattcatctgtatgcacaataatgttgtatcaaccaccatatcgggtgacttatgcgaagctcggctaagcaagaagaactagttaaagcatttaaagcattacttaaagaagagaaatttagctcccagggcgaaatcgtcgccgcgttgcaggagcaaggctttgacaatattaatcagtctaaagtctcgcggatgttgaccaagtttggtgctgtacgtacacgcaatgccaaaatggaaatggtttactgcctgccagctgaactgggtgtaccaaccacctccagtccattgaaaaatctggtgctggatatcgactacaacgatgcagttgtcgtgattcataccagccctggcgcggcgcagttaattgctcgcctgctggactcactgggcaaagcagaaggtattctgggcaccatcgctggcgatgacaccatctttaccacccctgctaacggtttcaccgtcaaagacctgtatgaagcgattttagagctgttcgaccaggagctttaatctctgccccgtcgcttctggcggcggggaaaatgttgcttatccctctcaaccccctgctttcccctgcgattaatttaacgaatagtgcgttttactgcgacatgtcattcacacaatgaatacataaggtaaaaaaagcacattatgcaaaattcattatctaattgaaaaaactagaattaacgataaataaccgtatttttaattcttttttgttattaaaattcacatttttaacacttagtatcaactgaaacagttagcgcggtattaattagctcaataattagtgtatacttgattttgtgatatgggtcacgaaacaaaggcccagctaaaagattatgtcgaggtaaaaatcatgaaaatcaaaaccactgttgctgcattaagcgtactttctgttctctctttcggtgcattcgctgccgactccattgatgctgcacaagcacaaaatcgtgaagcaatcgggaccgtatccgtaagtggtgtggcgtcttcgccaatggatatgcgtgaaatgctgaacaaaaaagcggaagagaaaggcgcaacggcctaccagattactgaagctcgtagcggtgacacctggcacgctacggctgaactgtacaaataaaccctcatcgtcttgtccgacgatattgnncccggttcgggggcttttttttgcgctaatgacgaacattaaaacgcaaatgcccttccagctcttcctctgcctcatcaaacagcaatattaacgcgccaaaacggcgacgcgttttctctcccagatgaacaaattcaatctcaagtggtagcggcaggacatcgttcattaacacatcccatagtgagtcgagatcgcgtaccttatctttcgccagaccaaaggtttggctaaagtcacgataaaaatcctcctgactctcaatctcatcaaaatcaaaggtataaatattcatctgttgcnaccgtcacgtttcgcggcgagttctgccgtgcatcgctaagtannnnncatgaaaaaaccgacgcttttggcgtcggttttgacttaactatcggtcaacgcatgttgatacttatggagcatccccgccagccgatgaacctgttccgtcacctgcggtggcgcttgccagatgcgtagcttttcctggtagatttccagttcttccagcaactgaccaaagtaccgacgacgtttatcatcgctacgggcagatatcacatggtctgctgtgcggcgcatttgtcggtgaaacgccgataaatcctcgttaaccgggatcggcgcatcacgcaggcgctggtgggcgataatcatcgtcagcgccaggcgaaatttcggcaaatcccctgggaacttattcatcagcaaaaacagctgctgataaagtgccgggaggtggttctctttacgacgtgccacattggtagtcatcgcggaaacagcggcagaaacaaactgattaagcagtacacgtccagtcctgtcgcgcgatttatcccgcaccagcaaaataacggtgaacgcgagcacacagccgacgatttgccctaatgcgctgtcgagaaactgactgaaatggaaagtcatcgggttatccagcacgataatatttatggtgctggccagcgcccccatcgagcccagtcgccgtttctgtacttctattccgaggaagaatcccagcactgccaggctaatacacagcagcaacatgctctgttgggtattagggataatcaccaaaaagtagagcagccctaacggcagcgcggccagcgtcccgtagataaagtcgatcgccaccatgcgtggattcggcaaacgcattgccagtgacgtcacgaccgcaatcatcaccattgcaccactgccggaagtccagcccgtccacagccagaaaagcgttcccagaatgcaggaaagtgtggttcgccagaagttaaccatcgcatgatgacgttcggctgactctactttgacttccggttcgccttgcaggatctcttcttcggtggcgttgatttttgtgttactgataacgccgcgcttgagaagctgataacgcgttgccgccgcgacccagctataaatggtgacaggcgtttcccgttccccggtccaggcgataactcttcgcaggcgtttgagctgcttgtggacgtcctgcgcggtttctaccggcgtgtcaaaaaattcgcggaaagtatcagtgatcaattccgggcgcgtattctgaataagataagtttcgcaggattgggtaatcagcgtcagcgatagcgtattgatcgcttttaaacgtcgattggcccgcgcccagcgggaagattccatattcaggttgctgcgcatgccttgtagcgccgtggtgcgtcgcaccaggtcgccccaggccttatcgacaacttcaccatcgccatgcttgatacagagttgcattaattgatattgcgcgaccagcaaactttccagctctcgatccacttcttgtttgatcgatcgcggagaaaagagcaaatccgccataatcgcacacacaataccgataacgatctcgctacaacgttcgacggcaaactgcggcgtaagcaatggttccggctgaatggtgatcacaatgatcagcgcggtataaccggccagcccccacgcatacgagttttctattcgtaccagcgaggatatccaggtacaaaaaccggcccagatacagcacaccagaatcatcaataatggtgcgcggatcatcgcaatgatgatcaccagtccggcaatacagccaataaatgtgccgatgatgcgcaaaaagccacgatagcgaatagcgccagaatacggttcacctcccgcagcaaaggccggaccggcggcaacaatcgccgctgtcagtaccgcccagcgtggcgtttccagctggaagtgaaagccaacaaacagcgccagtacaatggcggtcgccagttttaccgcaaagcgaatatgttggttagcaatggagaaaatacccatcgtgattaaccaaactcacgcaggcgatgggccattttacggaagaacgaatcctggctttcgtcgcgatcttgtttgccagtgaccaccactgtagcagtggtgcccgcaggccagatgttctcttgctggttgtcgagacgaatacgaaccggaacacgttgcgccaaacgcacccattcaaggttagagtcgatggtcgccatccctttgtcgtcacgcgtgctgctggcgttggtgaccccagcggcaacactatcaacagtccctttcagcactttgttactgccaagcggcgtgatctctgcacgatacccagggcgcaccccttccagcttagtttcttccatataggccagtacatagaaagagttctgtttcaccagcgcaaccgccgttgatccacgagtaataaactcaccggtatagacgttgaggttggtcacccagccatctgctggcgcgcggatcaccgtgcgttcaagatccagttttgccagatcgcgggtcgcctgcgctttcgctaactgatgcagaaccgtttgtagtacgttgttggcctggtcgatctcttcgcgagacatcgcctgcacaccgagacggttacgacgtccggcctcctggcgtttctcctgtgccagtacctgataataagcaacatcggcttgcgcttcctcaagcgccttttgatagcgcggctggtcgatggtgaacagaacctgtccttttttcaccagcttgtcatgaacattcacctgggtaatgagtccagaaacgtccggcgcgatcgcaacgacgtcagcgctaaagcgcncgtcacgcgtccagggggattcggtgtaatagacccaggcattaaaaattgcgatgaaggccagaatgactaatacgaccgtgatggccgtacgggagaattttcttattagtgttttcacttcaacctcaaacgaacagtcgcgatatcaaataaaacaagcagcaatagagcgcggtgttgaacaacgccggatgccagacaaagtcgtagatacctgttggcacaagtacccggcgcaccagccagaaaatcgccagtgataaaagcaattcaaaaaatatcggtgggaaggacagcccaaacaccacgataacgggaaacagactcatgttgaccttggttgtatagagagagcaggcgttattattttcagcatctgtcgccgcagagaagggcatggaaagccgggcgagagcaacattgctgtagattgatatttaatatattagcgtaactgttatgctgttatctatattatgtgatctaaatcacttttaagtcagagtgaataatggaacgactaaaacgcatgtcggtgtttgccaaagtanttgaatttggctcttttaccgccgccgccagacagctacagatgagcgtttcgtccatcagtcagacggtgtcaaaactggaagatgagttgcaggtaaagctgttaaaccgtagcacacgcagcattggcctgaccgaagccggtagaatttactaccagggctgccgtcgtatgcttcatgaagtgcaggatgttcatgagcaactgtatgccttcaataacacccccatcgggacgctacgcattggctgttcttcaactatggcacaaaatgttctcgccgggctgacagccaaaatgctgaaagaatacccaggtttgagcgtcaatctggttaccggaattccagcccccgacctgattgccgacggtctggatgtggtgatccgcgtcggcgcgttgcaggattccagcctgttttcccgccgtcttggcgcgatgccaatggtggtgtgcgccgcgaaaagctatctcacacaatacggcataccggaaaaacccgccgatttaagtagccattcatggcttgaatacagcgtgcggcccgacaatgaatttgaactgattgcaccggaagggatctcgactcgcctgatcccgcaagggagatttgtgactaatgatccgatgacgctggtgcgctggctaacggcgggtgccgggatcgcctacgtgccgctgatgtgggtgatcaacgagatcaatcgtggggagctggagatcctgctgccgcgttatcagtcagatccacgcccggtttatgcgttatataccgaaaaagataagctgccgctgaaggtacaggtcgtgatcaactcgctgacggattattttgttgaggtcggtaaattgtttcaggagatgcacgggcgcgggaaagagaagtaattcatattgtactgttacgttgtacaaacctgtgccaacgggttcccctcaccctaaccnnnnnnccaaaggggcgaggggaccgttcgtgcacgaggaaggattaattatccttctgaaaatactgaaattattacgcagtaccgccaacagtcaggttatcaactttcagcgttggctggcccacgccaaccggcaaactttgcccttctttaccgcagacacccacgccgttatccagtttcaggtcgttgccaaccatcgaaatctgctgcatggtttcgataccggaaccaatcaacgttgcgcctttcaccggcttcgttactttaccgttttcaatcagatatgcttctgaagtggagaaaacgaatttgccggaggtgatatccacctgaccgccaccaaagttcggtgcatagataccgtactcaacggattcaataatttcctgcggggtcgatttacccggcagcatataggtgttggtcatacgcggcatgggcagatgggcgtaggattcacggcgaccgttgccagtcggcgtcatccccatcaaacgcgcgttgagtttatcctgcatgtagcctttcagaatgccgttctcaatcagcacgttgtactggcctggcgtaccttcgtcatcaatcgccaccgaaccacggcgatcgaccatcgtaccgtcatcaaccacggtacacagttctgaagccaccagctccccgacctgtccactaaatactgaagtgccacggcggttgaagtcgccttccagaccgtgacctaccgcttcatgcaacagcacgcccggccaacctgcgccaagtactaccggcatggtgcccgctggtgcagcaacggcagaaagattgaccagcgccatacgtactgcttcttttgcccatgcatccgcacggacttcgccgtcgagatcggcaaggaagaactcataaccaaaacgaccgccgccgccactggcaccgcgttcgcgtttgccatcttcttcgaccagaacgctcacggaaagacgcaccagcggacggacatccgccgctagcgtgccgtcggtggccgcaaccagaattaattcatagacaccactgaggctggcagtcacttcctgtacgcgcttgtccgcttcgcgggcaaccttatcgacgcgacgcaggatatccagcttctcttcacggctcatgctttgcagcggatctaccgaggtatacaacgggctatgctctaccgcgcccagcgtctgtactttgccatcaccgctatcacgggcgatggtgcgcgccgnttgcgcactctgttccagcgccagcaggctgatttggtcagcgtaagcaaatccggttttttcaccgctgattgcacgcacaccaacgccctgatcgatgttgtaagaaccatctttaataatgcggtcttctaaaacccaggattcgtgatagctcgactgaaaatagagatcgccataatcaaggcgacgttcggccagttgaccgaggatcacgaacaagtcctgatgtttcaggccgttcgccgctagcaattgttcacttaccaggttaagactcatcgtttttgctactcgttagttactgcagtagaggattttttacggctgccggatgcggcgtgaacgccctatccagcctacggttatgttctggctcgttggcctttggcaacgattatcctatgagattggggcaattacgcgccctcgtcaaatcattgcgctttttctttacgcggttggcgcaacacttcgttgatttgcggatcgtccagcggacccgaaatgtgatagcgcaaaatggagactttgctccacagcggccccagcactttactggcggcaaacactgcngcgccaacaatggggttaaccgcaaaagccgcagccacgcccactgtcgcagaaatctctggtgcgacaaccgcttccatattcaggtcgcgacgtaccagatttaccgaccctttcatggcgatatccgcctccaggccatccaccagcgtgtcgtcggtgtgcataacgccgtctttaatccacgcggtgctgcgaatggagtcaaaatagaacccttcgccaaaagtgtctctgaaatcaaaacgcagcttacgcatcagggcatctacgctcaataagcgcagcaattgcccggcatgtccggtattgatttcggtaatttcgcctttacccagttgagtatgaatgatgccattcaacgtcgcctcatctggctgccacggtgctttacgccagtgtaaatcgtaatccacattaaatgacgactgccgtatgggcgtcgtgacaccaaaaaattctgcggcggcatcaattttctgcccgcgcagttttcctttcagcgaggtacgttcattccccggattgttaatccattcaccatcggcagtgagccgcgaaaaaccagtatcaatcagtccattggtcagcgttaatgtattgccagaaatggtgatatcactgtcaatgcgcccgaatttttgcccccagaaccagcactctgcgcatcgtatttgggcgtccgaccagccacggaagttaatgcgttccgttgtcgggaaaggtgatgacggcgttgaatcaccacgagttttcgccacgctcgggttgtaataaagatatttgatattcgccagccacggcgcgttattacgcatcgccagcgtggcgttgatttcacgcccctgcgcctcaacctgggtgccatttgccgtcggttgcgaaacaatactcaggttattccattgctgatttcccagcgacaacataggcgtacgtaacgttatgtgttgtgggaaactcgctgcaccaccgacactctccgccgcacctttctgaaacagggccagccactcggcaccattcatcggcggcatattgagttcaacaccactttgttccggcaacggcgggagcgttttactgtctgccgcccaaatagcacggtcgagcgtcagcttttgaccgagcaaccagcggctattgaaatgattatccgcaccagcctgtccggttaattcaaagctgttgagattgccatcaaccttaacgtttaccggcagtggttcacccgcaggtttggctaacggtgaaggtaagtgactgctcacattcttcaaatcgccgtttagctctacgttatacgtcgcgccagcatgataaggcagaacaatgcccactttaccatcccacgccacgctgccactcaatgcttcgttcaccgctgcaggcagaacgccggttttcgccggttgccagttaccgttgagattcaccgcgacctggtaggcttttgccccttctttggtggaaaaatccacgttcaacggctgattaaaccagcttgctgtcagtggttcactttgcagatcgccattgataaagctgaatttaccgctcaaatttttcagggtgctgtcgagtggtttgataaacagactgttattacgcagcgtcacttcacctttcgcggttaccagctcgccgttcagcgggatatcaagatgtaagcgagcattcacatcgccgtcgagctggagttcttgcagggtcgcacccagagaatctttcagcggtgtctcatcaaagtaagggccaacggctttacccggacctttaatgtcagcgtcaatcagcagtttttcttttgagtagtcagggatcactgcggtgagattactcgcgcgcacgccgcccagattaacgccatcggttttcatccataaaccgtcgttaataaagtccagttcaataccaaggttagttaatgcaggccagtccggctggaaggcaaacttcgcgttgcgcagcggcaccagcacttcaaactgaccttcgttgtgtttataggggaagagttgcggattgccaccataaaccagcgtcgcgttatccgcttcnccgccctgaatcgcgccacttaagtaatcaaccaggtctttacccatcaagttttccgggaaatagcgccaggcttgtgaaccatcatcggtactgatgccagccagaatacccagccagggttcatcgttagcaggttgcaggtaacgaaaaccgccgcgcgcatggacggctttggctttaacgtcaatattacgcccatccagctggaaacctttgtcattgttcagccagcttatagttgcctggccgtcggcgatttccagtggcgcacggaataccgtttcgtaaggcatctttgcctgcttcatcgacgcggtaagcaaaccattttcaacgctgccggaaagcgtcccggagaagtgttccgcacccggtaataatttccattgcttccaggccagatcgctccacgatgcctgaaaacgggtcttgtctgccgcctgaagcgggatatccagcgccagagtgttaatcttgccgctcggttgtgtagagcgccaaacatcacccagtgcaggtgaaagtttcgcggccagcgggcgtatgccctccaggcctgccagctccagattactggcgcgaatccggagttcgtcactgcgtttattgtctttgccgccaacgtcctgttccggtatccaggccagcgtcaatgctccgctcggccagggtttgccgtccatcgtgatccgtgtatcgggaatagagaactgccatcccggattttcacgcgtaatatgcgcggtcagattatccaccgacagcgtatgcgtttccttctcgcccaaccagctggcaccaccctgtttcagccagacgtcaccgccggttacatcgcctttgtcgatcgtcatccagccttcaagggagaactgcgccgtttccagcgcaatattgtcctgcatccatttaccgagccacggcttcaggtcgatgtcatccgcctggagccagacgcgaccattgcttaacaacccctcatcatcgcgcaaatccatgcgcacctgcatcacgccgtgctgtccggtaaggctggagaggcttaccaggccttccgcacggtgtcgacgtggatcgttcagccaggtgagttgtgggatcgccagctcggcgcgctgaccggatggcgtcaggaaactgacttcactgtcgcggagatcgaaatggtcaaattgacgaagaaacagatcgctgatgtgactggcttccagactgtcatcgctaccaccgctggtgataggagtgttggtgcgaaagcgcagctgccagaaagtgaggtcgcgaaactgccagcgcatatgtaacaggctctgccagacatccagcgccagagtaacgcgtttaaccgaaaattcgccgccatcctttagttctgcacggatgtcgtgcgcttcaagcgtcgggccaaaattctgccagctggctgagagctgactggcttctaccggcatgccagtcgcggattctattttgttgaggatttccggacgccaggcgtcaagatgcggtaaagcaatacgcaggccgctaaccagcagggcagcgatcacaacgagcgcggctccagtaagcagtaaaatccccggcaatcgcctcacccgtcactccttgtctgctaaaaatgtgactcaaaaaccctttgccggatggcggcccagcatctgtttacatcattacgacgtcaaactgctcctggttatagagcggttcaatttgtactttaacctgtttgccaacgaaaatttccacttccgccagcgagtgtgactcttcgcctttcaaggcttcggctactgccggagaagcatagaccaggaaacggtcggagtcgtaagcatggtgtacacgaacaatctcgcgcatgatttcatagcataccgtttccacggttttcaccgttccgcgaccgtggcaggttgggcattcgttacacagtacgtgctcaatgctttcgcgggtgcgtttacgcgtcatctccaccagccccagcgccgaaaaaccattaacgctggttttcacccggtctttgctcaacgcctgctccagcgagtgcagcactcggcggcggtgatcttcattattcatatcgatgaaatcaataatgataatcccgcccagattacgcaaccgtaactggcgagcgatagcctgcgtcncttcaatattggtattgaaaatggtgtcgtccagattgcgatgaccgacaaacgctccggtattgatgtccacggtggtcatcgcttcggtctggtcgataatcagataaccaccggatttcagttcaactttgcgttccagcgctcgctggatttcgttttcgacatcaaagagatcgaaaatcggctggcgtccggtgtaatgctccagcttgctggtcatctcgggaatgtactccgaggtgaactcaagtaacgcttcgtaagtcaggcgtgagtcaacgcgaatgcggtccagttcggcatcggcgaaatcacgcagaacacgctgcgccaacgccagttcgccgtacagctgataacgggtctgcgggcgctttttacgctccataactttggtccagacgcgtttcagataagcggcatcggaggccagttcagcctcgccaaccccttccgctgcggtacggatgataaacccgccctgctcgtcgcaatactctgcgaccacttttttcaggcgttcacgttctgattcgctttcaattcgttgggaaaccccaacgtgagaagcccctggcataaagaccagatagcgagaaggcagcgtgatatcggtggtcaggcgcgcccccttagtgccaagcggatctttcaccacctgcaccatcagatcttgcccctgacgaaccagttccgagatgtcgcgcaccgtgaattgcttttgttcttcacccgccacacattcggtgtgcggcatgatgtcagatgcatgaagaaacgcggctttatccagcccaatatctacaaaagccgcctgcatacccggaagtacacgacttacacgacccttgtagatattgcctactattccgcgtcgcgcctcacgttcaatatgaatttcctgcagaataccgccatcaatatacgccactcgcgtttccgaaggcgttacgtttactaacaattcagccgtcatgtttatcccttttctcacgcagtgcgttaaaattacttaataattcatacgtttcaaccagcggtaagccgactacggcttgatagctgccatttatcttcctgacaaaacagccacccagcccctgaataccgtatgcacctgctttatctaacggttcaccgctggcgacatagcccgcgatgtcttcgtctgttaacgttctgaaagtcacatcggtgaccaccaggcaatcgagaatgtgccggctgtcggccaacgccactgccgtcatcacctgatgggtctgacccgatnnnnngcnnaacatctgcgccgcatgctctgcgtcgcgcggtttctccagcacttctccgttcaggataacgatagtatccgcacccagcaccgggagatccttcgccgtttgcgcgacacctgcccgtgctttctcgcgcgccagacgcacaacatactgctgcgcgctctcctgcggctgacgctgctcctcaatgcccgtaacaatacgttcaaaggtcacgccaagttgcgcaagtaactcctgacgacgcggagaaccggaagctaaatacagagaagtcatagaaacctttattgcactgcaaactgctgacggactttacgcatcagcaagaaaatccacggccagagcaccccattgactacactactccagaacacttccggtctgaaagagacgttaatcactaaaaactctgcccagaaaacaataatatccaccaccagcgaaagcaacatgacgaccagcgcctgctgccataatgcgaggttgcggaaaagctggtatttcagcgccaccaggtaagcaatgatgctcatcgccaatacgcgtacgccaagcgtcgagccgctgatcagatccagtatggcacccatcacaaaacctgtgcccacatttacgcgatggggcaaggccaggatccaatacaacaagatgagtaacacccagtttggccggaaaacaatcaggttatccggccagggcatgatttgcagcaaaagcgcaatgaggaaagagagccagattacccagcgtccctggctacgatagctcgccactattgccctcccggcgcacgcgcaggcggttgagcaccactttgcggcggcgtagccctttgtggagagcgattagcagcgggctgtgtgggcgcagcaggcgcagtagctgcatttcctgtcgtgggttgctgcggagtcggctgagcgatccccgttgccggttcaggtaactttggccccatcgcgtctggcgaaggcaatacctgcggcatcatctgcatcagacgttcattagcaacacgatgcacctcttccggcgtcatcgggttagcgccgttacgatctgccccccacagcagcagcagataacgcaaacgttgcagccctgcagtcggacgcgcctgaatcacagtataagcgcgctgggtatcgagttttacggaagagacaaccgcgaccggatagccttccgggaaacgaccgcccagaccggaggtcaccagcacatcaccaacacgaatatccgtattcgctggcagatgctcaagctgcaaatcatccgtacaaccgttaccggctgcaattacgcggatatcgttgcgcagcacctggattggcagcgcgtgggtcgcatcacaaatcagcagcacgcgactggtcagtttagcgacggccaccacntgaccaacaacacctttgtcgctgatgaccggctggccttcataaacgccattaacgctacctttatcgataacaacttgatcgctataaggatcgttaaccgtggagataacctgagtcaccattttctgctcatcctgacgcagcggggaacccagcagctcgcgcagacgcgcgttctcctgtttgtattgtccaagcatcagcagttcactgtttttcagcaacagttcctgacgtaacgcccgattttcaagttctagttggtcacgcgaggccagcgtctgcgatacgccatccagcaattcacgaggagcattggaaacaaagtagaaaggactgacggcggtatccatataagtacggatttgactgaacgtccccaggcggctgtcggcaataataatgccgagcgccaccagcaccgccagaataaggcgaatctgtagcgacgggccacggctaaaaattggcttcataagttatgcgtattctcgtatcagaccaggcagggtaaacagacgcttcccctgcctgcatccgattactcttcgctgaacaggtcgccgccgtgcatgtcgatcatttccagcgctttgccgccaccgcgcgccacacaggtcagcgggtcttcagcaacaacgactggaatgccggtttcttccattaacaaacggtcaaggttacgcagcagtgcgccaccaccggtgagtaccatgccgcgctcggagatgtcggaagccagttccggcgggcactgttccagtgcaaccattaccgcgctcacaataccggtcagcggttcctgcagtgcttcgaggatttcgttggagttcagggtaaaaccgcgtggaacaccttctgccaggttacggccacgaacttcgatttcacggacttcatcgcccggataagccgaaccgatttcgtgcttgatacgttctgcggtggcttcaccgatcagagaaccgtaattacgacgcacatagttgatgatagcttcgtcgaaacggtcaccaccaatgcgtacggaagaggagtaaaccacgccgttcaaggagataacagcaacttcagtggtaccaccaccgatatcaaccaccatagaaccggtcgnttcagaaaccggcaggccagcaccaattgcggcagccatcggttcttcaatcaggaagacttcacgggcaccagcgccctgcgcggattcacgaattgcgcggcgttcaacctgggtcgcgccaaccggtacacaaaccagaacgcgcgggcttggacgcataaagctgttgctgtgcacttgtttgatgaagtgctggagcattttttcagtcacgaagaagtcggngataacgccgtctttcattgggcgaatggcagcaatattgcccggcgtacggcccagcatctgcttcgcgtcatgacctactgcagctacgcttttcggtgaaccggcacgatcctgacgaatggccaccacggaaggctcattcaatacgatgccttgtccttttacataaatgagggtattcgcagtacccaggtcaatggacaagtcattggaaaacatgccacgaaattttttcaacatactaagggataatcctgaaagctggggcggaaaagaaaatccgcttactttaccaaccacacgcagcagcgacaaggcgcaaaaatcatctgctacggtgaaaattagtgcagttcgtttcctttgttacaaatctctgcctgagtccagaaaggcttaatgcatcagcagcattcctcgcctgtttgcaaccgcgtaaggtcattcatctgcatatgtgctgcaacaatctggcgagcagacaagcacactcccatgagacgcagcgcgcgttattctacgtgaaaacggattaaacggcaggttaaaccgagtatctttgtgaatattttttcacgttagtatcaagtggcggtgaggacgcgaaaaaatccccttgcccgcctgtaacaccgcgctgaatcagggtctgccactcgcttcgcgaacgcacaccggtggcgtaaacctgggtgctggtccctgagcaggcttccaccaggctttgaaccagcagctggttctccgttcgcttctcaatgtttctgaccagccccggatggagcttgagtaactcaacattaagttctttgatccaactggtgcttaccagcgtcaaaccagcctggttgacggctacccgtacccctaaagcattcactaaacgaataacaggttgtaaacgactgatatgttgacctacatcggcctctgcaagttcaataattatgcgttttcgttgtgatttttcacattgcattaacgtatcgcgcagccaacgctgaaaacgcgggcgaatcagcgactcaacggtaacctgaatcgccagattttcctctggccagtaacgcaatagtggaataagacggctgatttgcagacggtcatactcttccgataagccaaactgcaagaccatcggcatatactccgccgagctaacctcttcattaccatcaaagatgcggcacatgagttcgcgatgatgaacctgaccttcgcgagtaaccgccggtttttgataaaggcgcgggccgccgcgactgagcatttgctcgataagcgtacgccagcgaacattaccgcgtcctttttcaggcaacgagtcatcgtaaatagcccagctattgccgccctgcaatcccgcattacgcgtggcagactctgcatgttccattacctgctcggtatcctgaccactacgccaggcgcagataccaatgtggatcatatcgtcgcgatcgagcattttattgttcggcaaggtatcgacggctttgattaactgaccggcgatgctctctgcctcttttaacgtccggtgcggtaacagcgcagcaaaatcactgcggtggtaacgcgccagcagtgcgccagggtagcgcatcataaatgtcgacagcagattcgtcagagtgaagaactgttcttcaacctggctgtgcccccaggtatcgctcaacatattgaaatccggcagacgaatcatcatcacgatcccgtgggtacctactttctcctgatcttccagtaacgttgctaactgattatcgaaaaagagtcggttattgaggccggttttcacgtcctgtgcggcataagagcggatcagcgtatcaagacggctgtgttgttcgcgtgcgttctgaatttcacgaagcagcgtatccagcgcactgctggttctgggcggccattcatagatggttcccaacacattagagccacgctcaccgtttaagatacgagtagcccgggtttccagcaattcttgcccggcaagttgccgttgtaaccagcgtaccgccagaaagagcataagaatgataaagccaatcgcccctgtgagcggcgcggtggtcatcaacgaatggaaatagttgcccatcggatcctgataaaccagacgcaacgacatccccggatgctttatcaacggaacgctcagttcacgaaacagatcgctggtgccaaccggacgataactaccatttctggccagggtataaacctgcttatcaccatggagcaggtctacacgaacgatatctgccgacatcattaattcggtaatttgtggccttaatgcgctgaagtcattcgacacaaggtgggtatcaatcgccgtcgccaccgcctgaacgcgatgactaaacttatactgaatggcgttgtagaaacttagcgaacagcccagcaaagtcacaaaaattgttaacccggtgagcagcgtaacaaaggccgaaaatttcgtcgttaatctcatccttgtgttaactccgatagtgaggaagcgggcatactagcaaatcagatttatctcgcaatttattgcgcttcatcggctttgcttttccattagcgagtatagtcttcagaaattattttccaatccatcatgcacatgaggaccacttatgcaggcgttacttttagaacagcaggacggcaaaactctcgcatcagtacagactctggacgaaagtcgcctgccggagggcgatgtcacggtcgatgttcactggtcgagcctgaactataaagatgcgctggcgattaccggtaagggaaaaatcatccgtaattttccgatgattcctgggatcgattttgccggaactgtacgcaccagcgaagatccgcgttttcatgccggtcaggaggtgttactcactggctggggcgttggtgaaaaccactggggtgggctggcggagcaggcgcgagtgaaaggtgactggctggttgccatgccgcaagggctggacgcgcgtaaagcaatgattatcggtactgccggttttaccgccatgctgtgtgtgatggcgctggaagatgccggtgttcgcccgcaggacggggagattgtcgtgacgggtgccagtggtggcgtcggcagtaccgccgtggcgctgctgcataagttgggttatcaggtcgttgccgtttccggtcgcgaaagtacccatgaatatctgaaaagtttaggtgccagccgtattctccctcgtgatgagtttgccgaatcccgtcctctggaaaaacaagtctgggctggggcaattgacactgttggcgacaaagtgctggcaaaagtgctggcgcaaatgaattacggcggctgcgtggcggcctgtggtctggcgggtggttttactctgccaaccacggtcatgccatttattctgcgtaatgtccgtttgcaaggggtggattcagtaatgacgccaccagaacgccgcgcacaagcctggcagcgactggtcgccgatttaccggaatcattctatacccaggcggcaaaagagatatctctgtcagaggcaccgaactttgccgaggccatcattaataaccagatccagggtcgcacgctggtgaaggttaactaaccatttagcaaggaataataagagagggaactcattttgaaatcattattcaatcggttaacgggaaaagcggttagccggacagctttcgtcgaacaccttggtcatgaagttgtacaacatcatccaaactggaaagtcatgatttcgactgaccataaattgatgcgcattgatactccactaaacagctattattgatacgcctccgtcgcctgttaggtttatggtgctttgcctgggcgacgctacgcttaaccccttacttatttctggtaccatgaggtgaataatctgattttgtttgactacaaattaatcactcgaacctatttaatgctgagcattgtcaatcggttaattttgcgtgctttagcattcacatctatccagacgatgcagtgaaaattgggtaatccccagcaaccgctgcgtaatgtcgtctatcttgtcgcgatcctggcatccctacattatttgtggtctgtgacgattatctcattgcagcccctcatcttcgcagggctggctttacagcttttcaccttacgttataagaagttccgtcgatgatggcgctaatttcgtgaattgtgcggcttgttgcaaattacacggtgttgaaggttatttacatgttagttgttgattatcttccctgataagaccagtatttagctgccaattgctacgaaatcgttataatgtgcgacctcgtcctccctgacgcagtttttgcgctgcggaaaaggtgacattggcgcaacgaaggtatattttgttttttgccggaggatagcagcagatcgctgcacaatgtccgtcaagtctaacattgacactctggggcaaaatagaccggcgtcccgacctgctggaatttatcgctatgcatacagctgtcggggcatacgctttacagacggcggtgaaacgcctgtcacaatcacactaaacaaagagtacggaacccactcatggatattcgtaagattaaaaaactgatcgagctggttgaagaatcaggcatctccgaactggaaatttctgaaggcgaagagtcagtacgcattagccgtgcagctcctgccgcaagtttccctgtgatgcaacaagcttacgctgcaccaatgatgcagcagccagctcaatctaacgcagccgctccggcgaccgttccttccatgaaagcgccagcagcagcggaaatcagtggtcacatcgtacgttccccgatggttggtactttctaccgcaccccaagcccggatgcaaaagcgttcatcgaagtgggtcagaaagtcaacgtgggcgataccctgtgcatcgttgaagccatgaaaatgatgaaccagatcgaagcggacaaatccggtaccgtgaaagcaattctggtcgaaagtggacaaccggtagaatttgacgagccgctggtcgtcatcgagtaacgaggcgaacatgctggataaaattgttattgccaaccgcggcgagattgcattgcgtattcttcgtgcctgtaaagaactgggcatcaagactgtcgctgtgcactccagcgcggatcgcgatctaaaacacgtattactggcagatgaaacggtctgtattggccctgctccgtcagtaaaaagttatctgaacatcccggcaatcatcagcgccgctgaaatcaccggcgcagtagcaatccatccgggttacggcttcctctccgagaacgccaactttgccgagcaggttgaacgctccggctttatcttcattggcccgaaagcagaaaccattcgcctgatgggcgacaaagtatccgcaatcgcggcgatgaaaaaagcgggcgtcccttgcgtaccgggttctgacggcccgctgggcgacgatatggataaaaaccgtgccattgctaaacgcattggttatccggtgattatcaaagcctccggcggcggcggtggtcgcggtatgcgcgtagtgcgcggcgacgctgaactggcacaatccatctccatgacccgtgcggaagcgaaagctgctttcagcaacgatatggtttacatggagaaatacctggaaaatcctcgccacgtcgagattcaggtactggctgacggtcagggcannnnnntctatctggcggaacgtgactgctccatgcagcgccgccaccagaaagtggtcgaagaagcaccagcaccgggcattaccccggaactgcgtcgctacatcggcgaacgttgcgctaaagcgtgtgttgatatcggctatcgcggtgcaggtactttcgagttcctgttcgaaaacggcgagttctatttcatcgaaatgaacacccgtattcaggtagaacacccggttacagaaatgatcaccggcgttgacctgatcaaagaacagctgcgtatcgctgccggtcaaccgctgtcgatcaagcaagaagaagttcacgttcgcggccatgcggtggaatgtcgtatcaacgccgaagatccgaacaccttcctgccaagtccgggcaaaatcacccgtttccacgcacctggcggttttggcgtacgttgggagtctcatatctacgcgggctacaccgtaccgccgtactatgactcaatgatcggtaagctgatttgctacggtgaaaaccgtgacgtggcgattgcccgcatgaagaatgcgctgcaggagctgatcatcgacggtatcaaaaccaacgttgatctgcagatccgcatcatgaatgacgagaacttccagcatggtggcactaacatccactatctggagaaaaaactcggtcttcaggaaaaataagactgcaaaagcgtcaaaaggccggattttccggccttttttattactggggatcgacaacccccataaggtacaatcctcgctttcttcacccatcagggacaaaaaatggacactcgttttgttcaggcccataaagaggcgcgctgggcgctggggctgacccttttgtatctggcagtttggttagtagccgcttacttacctggcgttgcccccggttttaccggctttccgcgctggtttgagatggcctgcatcctgacgccgctgctgtttattggactgtgctgggcgatggtgaaatttatctatcgcgatatcccgctggaggatgacgatgcagcttgaagtaattctaccgctggtcgcctatctggtggtggtgttcggtatctcggtttatgcgatgcgtaaacggagcaccggcaccttccttaatgagtatttcctcggcagccgctctatgggcggtattgtgctggcgatgacgctcaccgcgacttatatcagtgccagttcgtttatcggcgggcctggagctgcttacaaatacggccttggctgggtattgctggcgatgattcagcttccggcagtctggctttcactcggtattctcggcaagaagtttgcgattcttgcgcgccgctacaatgcagtgacgctgaacgatatgctgtttgcccgctaccagagtcgtcttctggtgtggctggcgagtttgagtttgctggttgcgttcgttggtgcgatgaccgtgcagtttatcggcggtgcgcgcctgctggaaaccgcggcgggtattccttatgaaaccgggctgctgatttttggtatcagcattgcgttatataccgcctttggtggctttcgcgccagcgtgctgaacgacaccatgcaagggcttgtgatgctgattggcaccgttgtgctgcttattggcgtggtacatgccgctggcggcttaagcaacgcagtacagaccttgcaaaccatcgatccgcaactggttacgccacaaggcgctgacgatattctgtcgcctgcctttatgacgtcgttctgggtactggtgtgctttggcgttataggcctgccgcatactgcggtgcgctgtatctcttataaagacagcaaagcagtacaccgggggatcatcatcggtacgattgtagtcgcaatcctgatgttcggtatgcacctggccggagcgttaggtcgtgcagtgatccccgatctcaccgtaccggatctggtgatcccgacgttaatggtaaaagtgctgccaccgtttgctgccgggatctttctggctgcacctatggctgcgatcatgtcgacaattaacgcccaattgctacaaagttccgctacgatcattaaagatctctatctgaatatccgtccggatcaaatgcaaaacgagacgcgtctgaagcggatgtcggcggtaattacgttagttctcggcgcgttgctgctgcttgccgcctggaagccgccagaaatgatcatctggctgaatttgctggccttcggtgggctggaagccgttttcctgtggccgctggtgctgggtctttactgggaacgcgccaacgccaaaggcgcgctaagtgcgatgatcgttggcggcgtgctgtatgccgtactcgcgacgctgaatattcagtacctgggcttccaccctatcgtgccctcgttactactaagtttgctggctttcctggtcggaaaccgtttcggtacatccgtcccgcaagctaccgttttgactactgataaataaagagttttgccatgccttggatccaactgaaactgaacaccaccggcgcgaacgcggaagatcttagcgatgcgctgatggaagcgggtgccgtttctatcacttttcaggatacccacgatacgccagtatttgagccgctgccgggcgaaacgcgcctgtggggcgacaccgatgtgattggtctgttcgacgctgaaaccgatatgaacgacgtggtggcgattctggaaaaccatccgctgctcggngcangcttcgcgcataaaatcgaacaactagaagataaagactgggagcgcgaatggatggataatttccacccgatgcgctttggcgaacgactgtggatctgccctagctggcgtgatgtaccggacgaaaacgccgtcaacgtgatgttagatccagggctggcgtttggtacgggtacccatccaaccacctctctgtgcctgcaatggctcgacagcctcgatttaaccggtaaaacagtcatcgactttggctgtggttccggcattctggcgatcgcggcgctgaaactgggtgcagcaaaagccattggtattgatatcgatccgcaggcgattcaggccagccgcgataacgccgaacgtaatggcgtttctgaccgtctggaactctacttaccgaaagatcagccanaagaaatgaaagccgacgtggtggtcgctaacatccttgcaggcccattacgtgaactggcaccgttaattagcgtcctgccagtttcaggcggcttactgggcctttctggtattctggcaagccaggcggagagcgtttgcgaagcctatgccgacagcttcgctctggacccggtcgtggaaaaagaagagtggtgccgtattaccggtcgtaagaattaaccttcgcatcgccatagggtgacgcggggcgaagtgcgagcaagctcacaaaaggcacgtaaatttgccgattnnnnnnnnnnnnnnnnnnnnnaannnnntcattcataaagaaaaattgagaacttactcaaatttctttgagtgtaaattttagtcactattttctaatatgatgatttttatgagtaattatcgcaccacgctcattttaaatgcaattctttgatccatctcagaggattggtcaaagtttggcctttcatctcgtgcaaaaaatgcgtaatatacgccgccttgcagtcacagtatggtcatttcttaactcatgcgcatcggacaatatcagctcagaaatcgcctgatcgcagcgcccatggctggcattacagacagaccttttcggacgttgtgctacgagatgggagccggattgacagtatccgagatgatgtcttctaacccacaggtttgggaaagcgacaaatctcgtttacggatggtgcacattgatgaacccggtattcgcaccgtgcaaattgctggtagcgatccgaaagaaatggcagatgcagcacgtattaacgtggaaagcggtgnccagattattgatatcaatatgggttgcccggctaaaaaagtgaatcgcaagctcgcaggttcagccctcttgcagtacccggatgtcgttaaatcgatccttaccgaggtcgtcaatgcagtggacgttcctgttaccctgaagattcgcaccggctgggcaccggaacaccgtaactgcgaagagattgcccaactggctgaagactgtggcattcaggctctgaccattcatggccgtacacgcgcctgtttgttcaatggagaagctgagtacgacagtattcgggcagttaagcagaaagtttccattccggttatcgcgaatggcgacattactgacccgcttaaagccagagctgtgctcgactatacaggggcggatgccctgatgataggccgcgcagctcagggaagaccctggatctttcgggaaatccagcattatctggacactggggagttgctgcccccgctgcctttggcagaggttaagcgcttgctttgnnnncacgttcgggaactgcatgacttttatggtccggcaaaagggtaccgaattgcacgtaaacacgtttcctggtatctccaggaacacgctccaaatgaccagtttcggcgcacattcaacgccattgaggatgccagcgaacagctggaggcgttggaggcatacttcgaaaattttgcgtaaacagaaataaagagctgacagaactatgttcgaacaacgcgtaaattctgacgtactgaccgtttctaccgttaactctcaggatcaggtaacccaaaaacccctgcgtgactcggttaaacaggcactgaagaactattttgctcaactgaatggtcaggatgtgaatgacctctatgagctggtactggctgaagtagaacagcccctgttggacatggtgatgcaatacacccgtggtaaccagacccgtgctgcgctgatgatgggcatcaaccgtggtacgctgcgtaaaaaattgaaaaaatacggcatgaactaattcaggttagctaattgcttgattaaaaggcgctactcggcatggggaagcgccttttttataggtgtcacaaagggagtgaccatgagaacaggatgtgaaccgacccggtttggtaatgaagctaagaccattattcacggtaatgcccttgccgaacttaaaaagctacctactgaaagcgtcgatctgatctttgccgacccaccgtataacatcggtaaaaattttgatggtctgatcgaagcctggaaagaagatctgtttatcgactggctgttagaagtgattgcagagtgccaccgcgttctgaaaaagcagggcagcatgtacatcatgaacagtacggaaaacatgccctttatcgatctccagtgccgcaagctttttaccatcaaaagtcgcatcgtctggtcatatgacagttctggagtgcaggcgaaaaaacactacggctccatgtacgaacccatcctgatgatggtgaaagacgcaaagaactacacattcaacggtgatgctattctggtagaagccaaaaccggatcgcagcgcgcgttgatcgattatcgcaaaaatcctccacagccttacaatcatcaaaaagtaccgggtaacgtctgggattttccgcgcgtgcgttatttgatggatgaatatgaaaaccacccgacgcaaaaaccggaagccttactgaaacgcattattctcgcctcttccaacccaggcgatatcgttctcgacccgtttgctggtagctttactaccggtgccgtagccatcgccagcggacgaaaattcattggtattgagatcaacagcgagtacatcaaaatggggcttcgacggctggatgtcgcgtcgcattactctgcggaagaactggcgaaagtgaaaaaaagaaagaccggcaacctgtcaaaacgaagccggttaagcgaagttgaccccgatctcattacaaagtaaaggatgtgtaagcctggtttgcagattattcatttcgtgtatatttcctgccagacttggttaaacatgcacaggctcaggtaatgattcgcaagtattggtggctcgtcgttttcgctgtcttcgtttttctgtttgatactttactgatgcagtggattgaactgctggcaacagaaacagacaaatgccgcaatatgaactcagttaatccactaaaactggttaactgtgacgaactgaattttcaggacagaatgtgaatttacatgacacttaattcattcgtttgatgaattaatttcgttatgttttcatctggcatgaacattcttaatacgttatcgaccagagcgggggcttgtttataaagatcataacccgccatattcattaaccagttttgaacaattccgctgaaggcaccatcaataataatcatcacaacatctaaatcgaggttatttgctacacaaccttgttgctgacacgcctgcaatacttcgcggagagtctgcggattaaagcccatcttttcgcgtatcactccctcggccagcatctcatcattaaattcacatttgtgatataagattttcagcaacgcctgctggcggggaattttggcaatannnngcaagccgacaatcaatttttcacgcaattgttgaaacgggtcatgctctaatccagccgtcaagtgttcctggattaactcccgcaatgaaggctgttgcaaccacatctcattaaacagttgggtcttgttctcgaagtgccagtagatagcgccacgcgtaacgttagcggcatcggcaatgtcgttgagcgtcgtcttgcttacgccatgttgcgcaaactgggcgatggcagtttcaatcagttcttgccgggtcttcagagcttcggctttggttctttttgccatgattaattattcaggaaataaatatcttcgacacagagtgagaaaatagcgaaggttaatctatcacctaatgtgtatttatacgagaggctaacattgagttgctataaatcgttaaataaataatatatattatttacttaagatacattcactacatcaatatatacttcaatttacgattttttaattctgcctctttcaacccgcgtcaaaataaaacagtagaatattaatctttttttgtgtttatgtgccttgagacgcctgtattcataactattccttacatcgacgaatgataatttgtaggatagcgaactgtatttttctttctgcgagttaacgcgttgcctttttgggtaaataacgcgcttttggttttttgaggaatagtaatgacgaaacatgccaggtttttcctcctgccctcctttattctgatctccgcggctctaatcgccggttgtaacgataagggagaagagaaagctcacgtcggtgaaccgcaggttaccgttcatattgtaaaaacggccccgttagaagttaagactgaattaccaggccgcaccaatgcttatcgtatagccgaagttcgcccacaggttagcgggatcgtactgaatcgcaatttcactgaaggcagcgatgtgcaagcaggccagtccctgtaccagatcgatcccgcgacctatcaggcaaattatgacagcgcgaaaggcgaactggcgaaaagtgaagccgccgccgccatcgcgcatttgacggtaaaacgttacgttccgctcgtgggtacgaaatacatcagccagcaggagtacgaccaggccattgctgatgctcgccaggccgatgccgccgtgattgccgcaaaagccacagtcgaaagcgctcgcatcaatcttgcttataccaaagtgactgcgccaattagcggacgtatcggcaaatcgactgtgaccgaaggcgctcttgtcactaatgggcaaacgactgaactggcaactgtccagcagctcgatcctatctatgttgatgtgacccaatccagcaacgattttatgaggctgaagcagtccgtagagcaaggaaatttgcataaggaaaacgccaccagcaacgtagagttggtcatggaaaacggtcaaacctatcccctgaaaggtacgctgcaattctccgatgtgaccgttgatgaaagcaccggctccataaccctacgtgctgtcttccctaacccgcaacatacgcttttgccgggtatgtttgtgcgtgcacggattgatgaaggcgtccaacctgacgccattctcatcccgcaacaaggcgttagccgcacaccgcgtggtgatgcaaccgtgctgattgttaacgataaaagtcaggtggaagtgcgccctgtcgttgccagtcaggcgattggcgataaatggttgattagcgaaggtctgaaatctggcgatcaagtcattgtcagcggcctgcaaaaagcgcgtccgggagagcaggttaaagccactaccgatacccccgcagatactgcatcgaagtaaggtaatctgacatggcaaacttttttattcgacgaccgatatttgcatgggtgctggccattattctgatgatggcgggcgcactggcgatcctacaattgcccgtcgctcagtatccaaccattgcaccgcctgcggtttctgtttcagcaaactatccgggcgctgatgcgcagaccgtgcaggatacggtgacgcaggttatcgaacagaatatgaacggtatcgataacctgatgtatatgtcctccaccagcgattccgccggtagcgtgacaattacccttaccttccagtccgggaccgatcctgatatcgcgcaagtgcaggtgcagaacaaactccagctcgccacgccgttgctgccgcaggaggttcagcagcaggggatcagtgttgaaaagtccagtagcagctatttgatggtggcaggctttgtntctgataacccagacaccacacaggacgatatctcggactatgtggcctctaacgttaaagatacgcttagccgtctgaatagcgtcggtgacgtacagcttttcggcgcacagtatgcgatgcgtatctggctggacgccgatctgctaaacaaatataaactgacaccggttgatgtgattaaccagttgaaggtacagaacgatcagatcgctgccggacagttgggcggaacgccagcgttaccagggcaacagttgaatgcctcgattattgctcagacgcggttaaaaaatccggaagaattcggcaaagtgaccctgcgcgtaaacagtgacggctcggtggtgcgtctgaaagatgtcgcacgggttgaacttggcggtgaaaactataacgttatcgctcgcatcaacggaaaaccggcggcgggcctgggtattaagctggcaaccggcgcgaatgctctcgataccgcgaaagccattaaggcaaaactggcggaattacagccattcttcccgcagggaatgaaggttctctacccttatgacaccacgccattcgtccagctttctattcacgaagtggtaaaaacactgttcgaagctattatgctggtgttcctggtgatgtatctgttcttgcagaatatgcgagcaacgctgatccccaccattgcggtacccgtggtgttgttagggacgtttgccatcctcgccgcttttggttactccatcaacacactaacgatgttcgggatggtgcttgccatcgggctgctcgtcgatgatgcgatagtggtggtggagaacgtcgagcgcgtgatgatggaggataagctcccgccaaaagaagcgacggaaaaatcaatgtcgcaaatacagggcgcactggtgggtatcgcgatggtgctgtcagcggtatttattccgatggcattcttcggcggttctactggggcaatttatcgtcagttctctatcaccatcgtttcggcaatggcgctttctgttctggtggcattgattcttacccctgcgttatgtgcaacactgctcaaacccacctcagctgagcatcacgaaaataagggtggtttcttcggctggtttaataccaccttcgatcatagcgttaaccactacaccaacagcgtcggcaaaatcctcggttccacaggacgatatttactgatctatgcgctgattgttgcaggaatggtggtgttgtttttacgtcttccgtcttccttcttacctgaagaggatcagggtgtctttctgaccatgattcagttacccgctggcgcgacgcaagagcggacgcaaaaagtgttggatcaagtgacggattactatctgaagaacgagaaagcaaacgttgaaagtgtctttacggttaacggctttagcttcagcggccaggcacaaaacgccggtatggccttcgtcagtctgaaaccgtgggaagagcgtaatggtgatgaaaacagtgcggaagcggtaatccatcgtgccaaaatggagttgggcaagatccgcgacggttttgtcattccattcaatatgccagccattgttgaactgggcacggcaacgggtttcgactttgagttaattgataaggctgggctgggtcacgatgccctaacccaggcccgtaaccagttgcttggtatggcggcgcaacatcctgccagcttagtcagcgtgcgtcccaatggcctggaagacaccgcgcagtttaaactggaagttgaccaggaaaaggcgcaggcattaggtgtttcactttctgacatcaatcagaccatttcaacggcgttgggtgggacttacgttaacgacttcatcgaccgtggtcgcgtgaaaaaggtgtatgttcaggcggatgccaaattccgtatgctgccagaagatgtcgataaactttatgtccgcagcaccaacggcgaaatggtgccattctctgcctttaccacttcacattgggtgtatggctctccgcgactggaacgctacaacggtctgccgtcaatggagattcagggggaagccgcgccaggaaccagttccggcgatgccatggcgttgatggaaaacctagcgtcaaaattacctgcgggcattggttatgactggacgggtatgtcgtatcaggaacgcttatcgggaaaccaggctcccgctctggtagcaatttcctttgtggttgttttcctgtgccttgctgcactctatgaaagctggtcaattcctgtctcggttatgttggtcgtgccgttagggattgtcggcgtgctgctggcggcgacactctttaatcaaaaaaatgacgtctactttatggtaggcttgctaacgacaattggcttgtcggccaaaaacgctattttgattgttgagttcgctaaagatctcatggagaaagagggtaaaggtgttgttgaagcgacactaatggcagtacgtatgcgtctgcgtcctatcctgatgacctctctcgcctttattctcggcgtattaccgctggctatcagtaacggtgccggcagtggcgcgcagaacgcagtgggtatcggggtaatgggaggaatggtctctgcaacgttgctggcaatcttcttcgtaccggngttctttgtggtgatccgccgttgctttaaaggataaatctgaaacataaaggcgctttcgggtgcctttatgttttccagtgaaacccataaaaattaataagatattcttttgctcactctttaaaagctttctatagctcccgctcccttcactatttttacaattcacataatttgtcattattcattccgcaagatttataacctccggtgataaaatggcattcagctcgttaataagagagttaacttattaagcgttagcgtttattactgaggtaacaccatgaaaagattaattcctgtggcattgctcaccgcattgctggcgggctgtgctcacgattcgccctgcgttccggtttatgacgatcagggtcgtctggttcacaccaatacctgtatgaaaggcacgactcaggataactgggaaacggctggggctattgctggcggggcagcggctgttgctggcctgacgatggggatcatcgctctgtcgaaataactgaacagggcgcggagtttcgcgctctgtttaacgatacagtatctttacataagatnaaatattgctatattctgctggctaattctctgctgatttagcatgttatatcgtgttatttcgctgctttcgaaataacgcatcaatttaactttcgcacttcccaccagaaatatactcacgctaacaatcattattctgcttagtaaaacacncgtaaatgttttgcgccaaaatgtggcgcatgtttcattttcgcaccattgcggggcgctgtttttattatttcctgtctacactcagcttattgcgacgcgaaatcgtgcgcaaaagctggcactacttttgcttataagaggatggccacagacaggcaaaagacgtttcccaaacgtcctataacgataattttcgcctcacaggaagcattatgaaaaagatgatgatagccacactggctgccgccagcgtgctgcttgccgttgcaaatcaggcgcatgctggcgcgacgcttgatgccgttcagaaaaaaggttttgtgcaatgcgggatcagtgatggattacctgggttctcttatgccgatgcagacggtaagttttcaggtattgatgttgatgtttgtcgtggtgttgccgctgctgtatttggtgacgacacgaaagtgaaatataccccactcacagcaaaagaacgcttcacggctttacagtcaggggaagtggatttgctctcccgtaatacgacctggacttcatctcgcgatgccgggatgggaatggcatttactggcgtcacttattacgacggcattggcttcctgacgcacgataaagcggggctaaaaagcgcgaaagaactggatggcgctaccgtctgtattcaggcgggtactgataccgaactcaacgtcgccgactatttcaaggcaaacaatatgaagtacacaccagtgactttcgatcgttctgacgaatcagcgaaggcactggaatccggtcgctgcgatacgctggcttcggatcaatcccaactgtatgccctgcgcatcaaattaagcaacccggctgaatggattgtcttaccggaggttatctctaaagaaccgcttgggccggtagttcgtcgtggcgatgatgaatggttctcgattgtacgctggacgctnttcgccatgctaaatgctgaagagatgggcatcaattcccagaacgtcgatgaaaaagcggctaatccagcaacgcctgatatggcacatctgctgggtaaagaaggcgattacggcaaggatctgaagttggataataaatgggcctataacatcatcaaacaggtgggtaactactcggaaattttcnngcgtaacgtaggttcagaaagcccgctgaaaattaaacgtgggcaaaataatctctggaataacggcggtattcagtacgcaccgcccgtgcgttaagtcggtgtgaggtaacgagcgtcgctacggcggcgctctcttcagcgttatgctttccgaggtttctatgtctcatcgccgctcaaccgttaaaggctcactctcttttgccaaccctacggttcgcgcctggttattccagatccttgccgttgttgctgttgtcggcattgttggttggttatttcacaacactgtaacgaatctcaataatcgtggcattacttcaggttttgcctttctggatcgcggcgctggcttcggtattgtccagcatttgatcgattaccagcagggcgacacctacggacgcgtttttattgtcggcttactcaatacgctactggtttctgcattgtgtattgtgttcgcttctgttttgggcttctttatcggtctggcgagactttcggataactggctgctacgaaagctttccacaatttatattgagatcttccgtaatattcccccgctgctgcaaatcttcttctggtactttgccgtgttgcgcaatttgcccggaccacgccaggctgtgagcgcgtttgatctggcctttttgagcaatcgtgggctttatattccgtcaccgcagctgggagacggatttattgcgtttatcctggctgttgttatggctatagtcctttctgttgggctattccgctttaataaaacataccagataaagaccggacagctgcgccgcacctggcccatcgccgcagtgttgatcatcggtttgcctttactggcgcaatggctttttggcgcagcactacactgggatgtcccagccctacaaggctttaacttccgcggcgggatggttttaattcctgaactggcagccttaacgctggcactttcggtttatacctctgcatttatcgccgagattatccgcgcggggatccaggcagtgccttatggtcaacatgaagcggctcggtcactgggattacccaacccggttacgctacgccaggtcattattccccaggcactgcgggtgattattccaccgttaaccagccagtatctcaacatcgtcaaaaactcctctcttgccgccgctattggctatcccgatatggtttcgctgtttgctggcaccgtgctgaaccagacggggcaagccatcgagacgatagccatgaccatgtcggtctatctgattatcagcctgactatctcgctgctgatgaatatctataaccgccgcatcgcgatcgtggaacgctaaggagtcatgatgacaaaagtattgctgtctcatccctcgcgcccggcgagccataactcaagccgcgcgatggtgtgggtgcgaaaaaatctgttctccagctggagcaatagcctgctgactattggctgcatatggttgatgtgggaactgatcccaccgttgctgaactgggcatttttgcaggctaactgggttggctcaacgcgtgccgactgcacaaaagccggtgcctgttgggtcttcatccacgaacgatttggtcagtttatgtatggactttacccacacgaccaacgctggcgaattaacctggcattactgattggccttgtgtcaatcgcaccaatgttctggaaaatactcccgcatcgcggtcgctatattgcggtctgggcagtgatttacccactgattgtctggtggctgatgtatggcggtttttttgctcttgagcgggttgaaacccggcaatggggcgggctgacgctaactttaattattgcatcagttgggattgcgggggcgctaccgtgggggatcttactggcgttaggtcgccgctcccatatgccgattgtgcgtatcttatcggtcatttttatcgaattcnngcncggcgtgccgctgattaccgttctgtttatgtcttcggtcatgctgcctttgtttatggcagaaggcaccagtatcgacaaactgatccgcgcgctggttggcgtgatcctgtttcagtcagcatatgttgcggaagtcgtgcgaggtggattacaggcgctgcctaaagggcaatatgaagcggcagagtcgctggcgttgggttactggaaaactcaggggctggttattctgccacaggcgttgaagctggtaattcctgggctggtaaataccatcatcgcactcttcaaagataccagcctggtgatcattatcgggttgttcgatcttttcagtagcgttcagcaggcaaccgttgatcccgcctggttgggtatgtcgacggaagggtatgttttcgccgcgctgatctactggatcttctgtttcagcatgtcgcgctatagccagcatctggaaaaacgttttaacaccgggcgtacaccgcattgaggacactatgagccaaattttactgcaacctgctaacgcgatgattacgctggaaaacgtcaataaatggtatggacaattccatgttttgaaaaatataaatttaaccgtgcaaccgggagaacggatcgttctgtgtggcccttcaggttccggtaaatcgacaaccattcgttgtattaatcatctggaagaacatcaacagggacggatcgtggtagatggcatcgaacttaatgaagatatccgcaatattgagcgcgtcaggcaggaagtgggaatggtctttcagcatttcaatctcttccctcatctgaccgttctacagaactgtaccctggcaccgatttgggtacgcaagatgccaaagaaagaggctgaagctctggcgatgcattaccttgagcgggtgagaattgccgaacatgcgcataagtttcccggacagatttcaggtggtcagcagcaacgcgttgccattgcgcgctcgctgtgtatgaagccgaaaattatgttgtttgatgagcccacatcggcgctcgatccggagatggtgaaagaggtgctggatacgatgattgggctggcgcaatcgggtatgacaatgttgtgtgtaacccatgagatggggtttgcgcgaaccgtcgctgaccgggtgatttttatggatcgtggcgaaatagtggagcaagctgcaccggatgagttttttgcgcatcctagtcagagcgtacgagggcatttttatcgcaggtaatccattaattgaatgttagttcgaaaagcataaaggccatcctttcggatggcctttcgcttgatttgatgtctggcagtttatggcgggcgtcctgcccgccaccctccgggccgttgcttcgcaacgttcaaatccgctcccggcggatttgtcctggttgggagagtgttcaccgacaaacaacagataaaacaaaaggcccagtcttccgactgagccttttgttttatttgatgtctggcagttccctactctcgcatggggagtccccacactaccatcggcgctacggcgtttcacttctgagttcggcatgaggtcaggtgggaccaccgcgctactgccgccagacaaattcttttctaatctgccgaactttaacctaaaaagtggtgctgatacccagagtcgaactggggacctcacccttaccaagggtgcgctctaccaactgagccatatcagcacgctttatttgatgcctggcagttccctactctcgcatggggagaccccacactaccatnngcgctacggcgtttcacttctgngttcggcatggggtcagnngggaccaccgcgctacggccgccaggcaaattctgttttatcagaccgcttctgcgttctgatttaatctgtatcaggccgaaaatcttctctcatccgccaaaacaccttcggcgttgtaaggttaagcctcacggttcattagtaccggttagctcaacgcatcgctgcgcttacacacccnggcctatcaacgtcgtcgtcttcaacgttccttcaggacccttaaagggncnngagaactcatctcggggcaagtttcgtgcttagatgctttcagcacttatctcttccgcatttagctaccgggcagtgccattggcatgacaacccgaacaccagtgatgcgtccactccggtcctctcgtactaggagcagcccccctcagttctccagcgcccacggcagatanggaccgaactgtctcacgacgttctaaacccagctcgcgtaccactttaaatggcgaacagccatacccttgggacctacttcagccccaggatgtgatgagccgacatcgaggtgccaaacaccgccgtcgatatgaactcttgggcggtatcagcctgttatccccggagtaccttttatccgttgagcgatggcccttccattcagaaccaccggatcactatgacctgctttcgcacctgctcgcgccgtcacgctcgcagtcaagctggcttatgccattgcactaacctcctgatgtccgaccaggattagccaaccttcgtgctcctccgttactctttaggaggagaccgccccagtcaaactacccaccagacactgtccgcaacccggatcacgggtccacgttagaacatcaaacattaaagggtggtatttcaaggtcggctccatgcagactggcgtccacacttcaaagcctcccacctatcctacacatcaaggctcaatgttcagtgtcaagctatagtaaaggttcacggggtctttccgtcttgccgcgggtacactgcatcttcacagcgagttcaatttcactgagtctcgggtggagacagcctggccatcattacgccattcgtgcaggtcggaacttacccgacaaggaatttcgctaccttaggaccgttatagttacggccgccgtttaccggggcttcgatcaagagcttcgcttgcgctgaccccatcaattaaccttccggcaccgggcaggcgtcacaccgtatacgtccactttcgtgtttgcacagtgctgtgtttttaataaacagttgcagccagctggtatcttcgactgatttcagctccatccgcgagggacttcacctacatatcagcgtgccttctcccgaagttacggcaccattttgcctagttccttcacccgagttctctcaagcgccttggtattctctacctgaccacctgtgtcggtttggggtacgatttgatgttacctgatgcttagaggcttttcctggaagcagggcatttgttgcttcagcaccgtagtgcctcgtcatcacgcctcagccttgattttccggatttgcctggaaaaccagcctacacgcttaaaccgggacaaccgtcgcccggccaacatagccttctccgtccccccttcgcagtaacaccaagtacaggaatattaacctgtttcccatcgactacgcctttcggcctcgccttaggggtcgactcaccctgccccgattaacgttggacaggaacccttggtcttccggcgagcgggcttttcacccgctttatcgttacttatgtcagcattcgcacttctgatacctccagcatgcctcacagcacaccttcacaggcttacagaacgctcccctacccaacaacacannnntgtcgctgccgcagcttcggtgcatggtttagccccgttacatcttccgcgcaggccgactcgaccagtgagctattacgctttctttaaatgatggctgcttctaagccaacatcctggctgtctgggccttcccacatcgtttcccacttaaccatgactttgggaccttagctggcggtctgggttgtttccctcttcacgacggacgttagcacccgccgtgtgtctcccgtgataacattctccggtattcgcagtttgcatcgggttggtaagtcgggatgacccccttgccgaaacagtgctctacccccggagatgaattcacgaggcgctacctaaatagctttcggggagaaccagctatctcccggtttgattggcctttcacccccagccacaagtcatccgctaanntttcaacattagtcggttcggtcctccagttagtgttacccaaccttcaacctgcccatggctagatcaccgggtttcgggtctataccctgcaacttaacgcccagttaagactcggtttcccttcggctcccctattcggttaacnntgctacagaatataantcgctgacccattatacaaaaggtacgcagtcacnnnnnnnnnnnnnnnnnnnnnnnnnnnnnncgtacacggtttcaggttctttttcactcccctcgccggggttcttttcgcctttccctcacggtactggttcactatcggtcagtcaggagtatttagccttggaggatggtccccccatattcagacaggataccacgtgtcccgccctactcatcgagctcacannatgtgcatttttgtgtacggggctgtcaccctgtatcgcgcgcctttccagacgcttccactaacacacacactgnntcannctctgggctcctccccgttcgctcgccnctactgggggaatctcggttgatttcttttcctcggggtacttagatgtttcagttcccccggttcgcctcattaacctanngattcagttaatgatagtgtgtcgaaacacactgggtttccccattcggaaatcgccggttataacggttcatatcaccttaccgacgcttatcgcagattagcacgtccttcatcgcctctgactgccagggcatccaccgtgtacgcttagtcgcttaacctcacaacccgaanatgtntnnnnnnnnnnnnnnnnnnnttgcnaaaatttgagagactcacgaacnncttnngttgttcagtgtttcaattttcagcttgatccagatttttaaagagcaaaacttcgcagtgaacctttgcaggtacactctgaagtattttttatttaatcactacagagatggtggagctatgcgggatcgaaccgcagacctcctgcgtgcaaagcaggcgctctcccagctgagctatagccccataacatgtagttaaaacctcttcaaatttgccgtnnnnatttggtaggcctgagtggacttgaaccaccgacctcacccttatcaggggtgcgctctaaccacctgagctacaagcctgtagaggttttactgctcattttcatcagacaatctgtgtgagcactgcaaagnacgcttctttaaggtaaggaggtgatccaaccgcaggttcccctacggttaccttgttacgacttcaccccagtcatgaatcacaaagtggtaagcgccctcccgaaggttaagctacctacttcttttgcaacccactcccatggtgtgacgggcggtgtgtacaaggcccgggaacgtattcaccgtggcattctgatccacgattactagcgattccgacttcatggagtcgagttgcagactccaatccggactacgacgcactttatgaggtccgcttgctctcgcgaggtcgcttctctttgtatgcgccattgtagcacgtgtgtagccctggtcgtaagggccatgatgacttgacgtcatccncaccttcctccagtttatcactggcagtctcctttgagttcccggccggaccgctggcaacaaaggataagggttgcgctcgttgcgggacttaacccaacatttcacaacacgagctgacgacagccatgcagcacctgtctcacngttcccgaaggcacattctcatctctgaaaacttcygtggatgtcaagaccaggtaaggttcttcgcgttgcatcgaattaaaccacatgctccaccgcttgtgcgggcccccgtcaattcatttgagttttaaccttgcggccgtactccccaggcgnnnnnnnnnnnnnnnnnnnnccggaagccacgcctcaagggcacaacctccaagtcgacatcgtttacggcgtggactaccagggtatctaatcctgtttgctccccacgctttcgcacctgagcgtcagtcttcgtccagggggccgccttcgccaccggtattcctccagatctctacgcatttcaccgctacacctggaattctacccccctctacgagactcaagcttgcagtatcagatgcagttcccaggttgagcccggggatttcacatctgacttaacaaaccgcctgcgtgcgctttacgcccagtaattccgattaacgcttgcaccctccgtattaccgcggctgctggcacggagttagccggtgcttcttctgcgggtaacgtcaatgagcaaaggtattaactttactcccttcctccccgctgaaagtactttacaacccgaaggccttcttcatacacgcggcatggctgcatcaggcttgcgcccattgtgcaatattccccactgctgcctcccgtaggagtctggaccgtgtctcagttccagtgtggctggtcatcctctcagaccagctagggatcgtcgcctaggtgagccgttaccccacctactagctaatcccatctgggcacatccgatggcaagaggcccgaaggtccccctctttggtcttgcgacgttatgcggtattagctaccgtttccagtagttatccccctccatcaggcagtttcccagacattactcacccgtccgccactcgtcagcaaagaagcaagcttcttcctgttaccgttcgacttgcatgtgttaggcctgccgccagcgttcaatctgagccatgatcaaactcttcaatttaaaagtttgatgctcaaagaattaaacttcgtaatgaattacgtgttcactcttgagacttggtattcatttttcgtcttgcgacgttaagaatccgtatcttcgagtgcccacacagattgtctgataaattgttaaagagcagttgcgacgcggctttcagctcactgtcgcgaggtggcgtatattacgctttcctctttcagagtcaaccctgaatttcaggattttttctcttcgttgttacgaccatcttgtgaagtgtttcacgttgtcgtctcaacggaggcgcattatnnnnnnnnnnnnnnnnnnnnnnnnnnnnnnnnnnnnnnnnnttttgcacaagtacttttttgatctttttttctgtttgttgttttttcaccctttttgctgcattcgcacacaaaacggtgcttttttgcatactaaaagacttgcacaaggccaataatgcccccaaagtcattagtaaatcatttattgctgaggtaagtatgtctgatgttttacgcccataccgcgatctttttccacaaatcggtcagcgcgtaatgatcgacgatagcagtgtcgtgattggtgacgttcgtctggctgatgatgtggggatctggccgctcgttgtgattcgtggagatgtacattatgtacagatcggagcacgcaccaatatccaggatggcagtatgttgcatgtcactcataaatcctcgtacaacccagatggcaacccattaaccattggcgaagatgtcactgttggtcacaaggtgatgctccacggctgcaccattggcaatcgagttttggttgggatgggctcaattttacttgatggcgcaatagtagaagatgatgtgatgattggtgcgggtagtctggtcccacaaaataaacggctggagagcggatatctgtatctcggtagtcccgtcaaacagatccgcccgttaagtgatgaagagaaggctgggttacgctattccgcgaataattacgtgaaatggaaggacgaatatctggatcagggtaaccagacccagccttgatcatcttcactttgttcctgaattaagttttccgcttcttcttccaggtcccagcgatgctgacgaaaactcgctaaccactgctctggcgtatctcctgtaaagcgatacgccaggctatcgccagagatcgcacatgtcagttgcatgccattcacgagagcgggaaaacatacacattttttattctcgacccactcttctctgtccggaaactggatggcctgattcacgcggacaattcctcctgcaattgctttataactggttctacatcaggcagaacgccatgccaaagaaggaaggcatgagccgcctgtgccaccagcattcctaaaccatcagcagtaggctttgagcctcgctgctcacaccatgccaaaaaaggagtttttcctttctgatagaacatgtcatagcaataaatgcctggatgaatgagcgatgacgggatcgccggaatatcaccactgatgccactggatgtggcattaataatgagatcaaactcatgaccttccagttcgtccatacccaacgcctgaatactgccagtgtgcgcaaacaatttagccaactcttccgctcgggataccgtccgattagtgattgtcaccgcacagtccagggaaagaagtggcagtagtacgccgcgagatgctccacctgcgccgatgagcagaatacgtaaaccaggacggataaaagacagacgttccagatcgcttaacaagcctacaccatcggtattgtcacccagcaagcgtccatcttctaaccgcttgagggtgttaacagcaccagccaacgctgcgcgttcagtaagctcatccgctctggcaaaagcctcttctttaaaaggcaccgtcacattcgcacctttaccaccagcactaaagaaagcgttcagtgtgttgacgaaatcattgatgggtgccaacacgcgcccatagggatgttcaatattcagttgctgagcaaattgctgatgaatgaatggcgatttgctgtgggctatcggattaccaaaaacagcataggtttccattatgttacccctgtcgaaacagttcacccgtcagggcatcgcggatttctgaaggatttaaacgcccccccgtttcaccaggcacaaccgggaacgccgcgccaaattgtgcgcgaacttcgtctactgttcgacaaggtggcaatccactcaagttggcactggtagaaaccagcggtttaccataagcctggcacaaagcaaccaccaacggatggtcggtgactcgtacagcaagcgaatcaaagcggcccgtcaaccagcgcggtgttgtcgcaggcgcgggaaagacaaaggtgacaggacctggccagcgggaaaaaatggtttcacgctgcacgtcagtcaacatggtgtcatcaatatagggtttaagctgctcgtaatttgctgcgattaaaatcagccccttatcaaccggacgctgttttaactccaacagtcgcatcactgctgtttcgctatcaggatcgcacccaacaccgaaaacggcttccgttggataggcgatgacacgttcttcattgagaacatctatcgcagctgcgatagcgtctccttgcaggttattattcacgttattattccgccgaaaccggctttccacattgtttactggcacaaaagtgttttacaccctgcgcggttttcttttcgatgagtagcggataatgacactcagggcattctccagctatgggtttgaagttaatggcaaattgacactccgggtagcgatcacaggagtgaaatgttttgccataacgggagcggcgctggaccagatggcccgtccggcattggggacatgtaattgctgtttcgtccggtttatcgataagttcggtatgttcgcattcagggtagttaatgcaaccaataaacataccaaagcgtccctggcgtaataccagatttgcgccacatgcagggcaaacctgcccctccagaactttgacgatatgtccatccgctgaagatttcagaggacggacgtagtcacacgccggatactgtgagcatccaagaaacggaccgtgtttcccggatcgaataaccagttcagccccgcactttgggcaggactcattattacgcaccgtgaacagtgctgatttcgccataacaacttatgctgaattaaagaaatgattaatgcagcataccttcattcacttcaaagagtaattcttccatttgctggtacgcattttcgcagcccggaatattgaacaacaccatcaggattacccatttcaggtcttccaggtcgaactctgcggtatccagcgcgagcactcgctctatcaccatttcacgggtttcaaggttaagcacctgaatttgctcaaggaaaagcagaaaaccacgacagctggcatccagtctttcacactcctcaggggtataaatacgcatggagagtggatcagaggccagttgcatcggttctgtcagtccttcctgataatccgcaagcttttccagccaaagcagggcattgtagatatcttctcgatcaaatcctgcgtcggtaagatcctgttcaagtttgtcttgatccacacgcaactcagcttctgtgtgaatataggtttcaaacaaatacattagtacgtcgaacatggcatgccctcctcaatcggacatagccgccgggtacagctgcgatccatcctgctaactccagttcgagtagttgagtaactacctctggcacaggttggccggcacgttcagcgacgacgtcaacaggtgttacctcatctcctacgttagccaggagctcaggaaatggcaatgccacgtcttcctgatctggtgaataaaatgaattttcaggggcgtntggcaaccagtgcaatccaaattgcaagttttccagaatttcttccggttccgtcacaagaatcgcaccttgttttattaaccagtgaggcccttcgcttcccggattccctattggacctggcaaggcaaaaacttctcgcccctgctcaagcgcacaacgtgctgtcaccagcgaaccactacgcaaagccgcttccaccaccagtacacctttacttagaccactgataatgcgatttcttcgtgggaaattgtaagcaaggggtggaacatcgaggggaaattccgagacgagagcgcccccctgttcaagcagactggcagccagtcgggcatgacggcggggatgaatggtattaagtccattccccaatacagcaatgctgacgccatttacctgtaaggctgctttatgcgctacaccatcgattccacgcgccagtccactcgtaattgtcgctccatgcttcgccagagtttcgcaaaataatcgtccccatcgctcgccataccatgaatgcgcccgactccccactacggcaagctgaaatgaatgcagcgcgtgcagttctccttcaacaaacagtgcaccggggtaatctgtcgtcgccagaagttgaggaggataaaattcgctgtccgcagggattaaatgatggttggattgctccaaccaacaaagtgagctttcgatactcttccgcggaaatgaaagaaagcgttgtgcctgccgcaatgtaagccctgtttgctgcaatacaaccgcatcaatatgcgactgtcttgccagccagtgagctatacggaccatatcatcgccgtacaagctgctgatactcattaaacgcagccaaatttctgtatcgaccatccttatctccctgccataagcagccttagcaatctttgcgattggtcagtgatgctgtcaatcagagggggatttgtctagaatagaagaaataatctttctaactcctgaacacatctctggagatttatgtcagttttgcaagtgttacatattccggacgagcggcttcgcaaagttgctaaaccggtagaagaagtgaatgcagaaattcagcgtatcgtcgatgatatgttcgagacgatgtacgcagaagaaggtattggcctggcggcaacccaggttgatatccatcaacgtatcattgttattgatgtttcggaaaaccgtgacgaacggctggtgttaatcaatccggagcttttaganaaaagcggcgaaacaggcattgaagaaggttgcctgtcgatccctgaacaacgtgctttagtgccacgcgcagagaaagttaaaattcgcgccctggaccgcgacggtaaaccatttgaactggaggcagatggtctgttagccatctgtattcagcatgagatggatcacctggtcggcaaactgtttatggattatctgtcaccgctgaaacaacaacgtattcgtcagaaagttgaaaaactggatcgtctgaaagaccgggcttaaggataagaactaacgtgtcagaatcactacgtattatttttgcgggtacacctgactttgcagcgcgtcatctcgacgcgctgttgtcttctggtcataacgtcgttggcgtgttcacccagccagaccgaccggcaggacgcggtaaaaaactgatgcccagcccggttaaagttctggctgaggaaaaaggtctgcccgtttttcaacctgtttccctgcgtccacaagaaaaccagcaactggtcgccgatctacaggctgatgttatggttgtcgtcgcctatggcttaattctgcctaaagcagtgctggagatgccgcgtcttggctgtatcaacgttcatggttcactgctgccacgctggcgcggtgctgcaccaatccaacgctcactatgggcgggtgatgcagaaactggtgtgaccattatgcaaatggatgttggtttagacaccggtgacatgctctataagctctcctgcccgattactgcagaagataccagtggtacgctgtacgacaagctggcagagcttggcccacaagggcttatcaccacgttgaaacaattggcagacggcacggcgaaaccagaagttcaggacgaaactcttgtcacttacgccgagaagttgagtaaagaagaagcgcgtattgactggtcactttcggcagcacagcttgaacgctgcattcgcgctttcaatccatggccaatgagctgggtggaaattgaaggacagccggttaaagtctggaaagcatcggtcattgatacggcaaccaacgctgcaccaggaacgatccttgaagccaacaaacaaggcattcaggttgcgactggtgatggcatcctgaacctgctctcgttacaacctgcgggtaagaaagcgatgagcgcgcaagacctcctgaactctcgtcgggaatggtttgttccgggcaaccgtctggtctgatagtccactcttctaagcccggtcttgccgggcatttttatacttatgaaaaaacaacgtaatttacgtagcatggcggcccaggccgttgaacaagtcgtcgagcaagggcaatcattaagcaacattctgccaccgctccagcaaaaagtttccgataaagacaaagcacttcttcaagagttgtgctttggcgtactgcgtacgctttcgcagttagactggctgattaataagtcaatggcccgtccgatgaccggcaaacagcggaccgtgcattacctgattatggttggtttgtatcaactgctttatacccgcattccacctcatgctgcgctggctgaaacggttgaaggcgctatcgcaattaagcgtccgcaacttaaagggttgattaacggtgtattacgccagttccagcgtcagcaagaagagttattagccgagtttaataccagtgatgcacgttatctgcatccttcctggttgctgaagcgtctgcaaaaagcgtatccagagcagtggcaatccatcgtcgaagccaataaccagcgtccgccaatgtggctgcgtattaatcgtacgcatcattcccgcgacngctggcttgcattgctggatgaagcaggaatgaaaggtttcccgcatgcggattaccctgatgctgtacggctggaaacacctgcacctgttcatgcgctacctggttttgaagacggatgggttaccgttcaggatgcatcagcacaaggttgcatgacctggcttgcgccacaaaacggtgaacacattctggatctttgtgccgcccccggcggtaaaacaacgcatatccttgaagtggcaccagaagcgcaggttgttgcggttgatattgacgaacagcgcctctctcgcgtttacgacaatttaaaacgccttggtatgaaggcaaccgtgaaacaaggtgatggccgttacccttcccaatggtgtggcgagcaacagtttgatcgcattttattagatgcgccttgttcagcaaccggtgtgattcgtcgccatccggatattaaatggttacgtcgcgatcgcgatatcccagaactcgcgcaattgcagtctgaaattctcgacgccatttggccgcatttaaaatccggtggaaccctggtctatgccacctgttcggtgttaccggaagagaatagcctgcagattaaagcctttttgcaacgtaccgctgatgccgaactttgcgaaacaggaacaccagagcaaccgggtaaacaaaatctgcctggtgccgaagagggcgacggcttcttttacgctaagctaatcaaaaagtgatgagataacgggtcgcgactgatgaaaattatcattctgggtgccggccaggttggcggcacactggcggaaaacctggttggcgagaacaacgatatcactgttgtcgataccaacggtgagcgtctgcgaaccttgcaggataaatttgacctgcgagtcgtgcaggggcatggctctcatccacgcgtattgcgggaggcaggtgccgacgacgccgatatgctggttgctgtaaccagttcagatgaaaccaatatggttgcctgccaggtagcctactcacttttcaacacccctaatcgcatcgctcgtatccgctcaccagactacgtacgcgatgccgataagctatttcattcagatgctgtaccgattgatcatctgatcgcaccagagcagttggttatcgataatatttaccgactgattgagtatcccggcgcattgcaggtggtgaacttcgctgagggtaaagtcagcctcgctgtggttaaagcctattatggcggcccgctgattggtaatgcactttcgaccatgcgcgaacatatgccacatatcgatactcgtgtggcagcaattttccgccacgatcgccccattcgtccgcaaggttcgaccattgttgaggctggtgatgaagtgttctttattgccgcttcacagcatatccgcgcggtgatgagtgaattacagcgactggaaaaaccgtataagcggatcatgctggttggtggcggtaatatcggtgcagggctggcgcgtcgtctggaaaaagattacagcgttaaactcatcgaacgtaatcagcagngcgctgccgaactggcggaaaagttgcagaatacgatcgtcttttttggtgatgcgtcggatcaagaactgctggccgaagaacatatcgatcaagttgatctgtttattgccgtcaccaacgatgacgaggccaatatcatgtccgccatgcttgccaaacgtatgggtgcgaaaaaggtgatggtattgatccagcgtcgcgcttatgtggatctggttcaggggagcgtgatcgatattgcgatttcaccacaacaagcaactatttctgcgttgcttagccatgtgcgaaaagcagatattgttggtgtttcctcattgcgccgcggcgtagcagaagctattgaagccgttgctcacggtgatgaaagcacctcacgcgttgtcggcagagtcattgacgaaatcaagctaccgccaggaacgattattggagcggtggtacgtggaaacgacgtgatgattgccaatgacaatctgcgcattgagcaaggcgatcacgtaattatgttcctcacagataaaaaatttattaccgacgtcgaaagactcttccagccaagccctttcttcttgtaattaataaggcgtctaatgacgccttattatttccctttgattatcaaggattaattaaattcattcctagcaggaaaatggcttaacatttgttagacttatggttgtcggcttcatagggagaataacatgagcattattaaagaatttcgcgaatttgcgatgcgcgggaacgtggtggatttggcggtgggtgtcattatcggtgcggcattcgggaagattgtatcttcactggttgccgatatcatcatgccaccactgggcttattaattggcgggatcgactttaaacagtttgctgtcacgctacgcgatgcgcagggggatatccctgctgttgtgatgcattacggtgtcttcattcaaaacgtctttgattttctgattgtggcctttgccatctttatggcgattaagctaatcaacaaactgaatcggaaaaaagaagaaccagcagccgcaccagcaccaactaaagaagaagtattactgacagaaattcgtgatttgctgaaagagcagaataaccgctcttaacaagcccctgaaagcagaagaccagtggtaaaaaagtgatttactttcttgccactggcctcccagttcccccgattgccatgttttccttttcgcatgtaactgcctttccccttcttatttttctctacgcgctgtcggaataagggatcatgtagtaatgcttctatcgcattatcctttatctgccctttagtatgctgatatcggctcataaaaactccagttggttatttaacggcgtgagtgtaatcctgccagtgcaaaaaatcaacagccactcttaacgccactcgccccttgttcaagagcttcaagaatcgagcaataaacactgctatgggcggtcccacaacaggcatcgttaaggcgttgcaaggaacgctgcatactctgcaactcggctatccgtgcttcgacttcctgcaatctttcctgcacaatgccttttgactcctgacaggtatggtgttcaggatcgatacggatcgacagcaactcgcggatcgactccagactgaaacctanttgtctggcatggcggataaatttcaatcgctggagatcgctttcggtatacaggcgaaacccaccttcggtacgcacttcatgctccatcatctgctgcttttcgtaataacgaatcgtgtcgggtgttacttccgccatttttgccagctcaccaatgcgatacatacatactccactagttatcgttgattttattcaacaacttgtcagcataatcgccgcgtaaaaaatcggtactcaatccagcttgtcgcagcttcaattccagtaatgacaatcgacggctaacctcttgatattgcggatcatcgtgacggatacctttgaggatatccagaagctggattgcttccctccgttgctcaagttctggcggtaagcaaccggcattcttcagcaagcgataccccgcacgtaattccggtggcacatgagaatcatcatccagtatcaatggttcgccgctacctgccaggttatcaaactcacctttcgcttgcgcttctgctatatggcgctctgcccactggtcaagtaaccacataaatactccaggggatgaacaaaaagagtacagctattgtagataagtggggatgctacgggtataaaaannnnnnnnnnggcgggtttttttacgttgcttcagattactctgcagcagcttctgctttctctgaacgatcaaccagctcgatgtaagccatcggcgcgttgtcgcctgcacggaagccacacttcagaatacgagtgtaaccaccggcacggctcgcgaaacgcgggcccagttcgttaaacagttttgccacgatctcgttatcacgagtacgggcgaatgccagacgacgattagcaacgctatcagtcttggcaagagtaatcagcggctcaactacgcggcgcagctctttcgctttaggcagagtcgtcttgatgatttcatgacgaaccagtgaacctgccatattgcggaacatagcctggcgatggctgctgttgcggttcagttgacgaccactcttacgatggcgcatgaccttatccttctcagtaaaaccttaacctgtgatccggttactcgtcagcgatgcttgccggtggccagttttccaggcgcatgcccagagacagtccacgggaagccagcacgtctttaatctcagtaagagattttttaccaaggttaggcgttttaaggagctcaacctcggtacgctgtaccagatcaccgatatagtggatagcttctgctttaaggcagttagcagagcggacagtcaattccagatcgtcaacagggcgcagcaggatcggatcgaactctggtttctcttctttcacttcaggctgacgtacatcacgtaagtcaacgaaagcttccagttgttcagccagaatggttgccgcacgacgaatcgcctcttcaggatcgattgtgccgttggtttccatttcgatgaccagcttgtccaggtcggtacgctgttctacacgcgctgcttcaacattgtaggcaatacgctccacagggctgtagcatgcgtcgaccagcagacggccgattgggcgctcatcttcttccgaatgaattcgggtagaagccggcacataaccacgaccgcgctgaactttgatacgcatgctaatagacgcgttctcatcggtcaggtggcagatcacgtgctgcggcttgacgatttcgacatcaccgtcgtgggtgatatcggctgcagtcacagggccaatgccagatttattcaaggtaagaataacttcatctttgccctgaactctcaccgccagccctttcaggttgagcaggatttccaggatatcttcctgaacgccttctttggtgctgtactcatgtagtacaccatcaatctcaacctcggtcaccgcgcaacccggcatcgatgagagcagaatacggcgcagtgcgttacccagagtatggccaaagccacgctctaaaggctcaagggtcaccttggcgtgcgtcgaactcacttgctcgatatcaaccaggcgcggttttagaaactctgtcacagaaccctgcattgtgtcctctctttggtactaagctttacttggagtaaagctcgacgatcaggtgttcgttaatgtccgcagacagatcagaacgctccggcttacgcttaaacgtaccttccatcttgccagcatcaacttccagccaggttggcttttcacgctgctcagccagctccagagcggctttcacgcgagactgcttcttcgctttctcacgaatgcttacaacgtcattcggactaacctgataagaagcgatgttaacaacacgaccgtttaccataattgctttatggctaaccagctgacgtgcttctgcacgagtggcaccgaagcccatacggtatacaacgttgtccagacgaccttccagcagagccaacaggttttcaccggtgttgcctttcagacgtgctgcttctttgtagtagttacggaactgacgctccagcacaccatagatacggcgaactttttgcttttcacgcaactgcacaccatagtcagacagacgcggtttacgcgcaccgtgctggccaggagcttgttcaattttacacttggtatcgatcgcgcgaacgccagacttaaggaataagtcggtgccctcacgacggctcagcttgagcttaggacccaaatatcttgccattttctttctccaacaaacctggaaaacgaggcgttatacgcggcgttttttcggcggacgacaaccgttatgagggatcggagtcacatcagtaatgttagtgatgcggaaacctgcggcgttcagagcacgaatagtagattcgcggcctggacccggacctttaaccataacttccagattcttgatgccgtattctttcacggcgtcagcgcaacgctctgctgcaacctgagctgcaaacggagtggatttgcgagaaccacggaaaccggaaccaccggctgttgcccaacccaacgcgttaccctgacgatcagtgatagtcacgatggtgttgttgaaagaagcatggatatgagccacgccgtcagagacttgttttcttacacgtttacgtgcacgaattggtgcctttgccattattcaatcaccccgattatttcttgatcggtttgcgcggacccttacgggtacgtgcgttggtcttggtacgctgaccgcgaaccgggagaccacgacgatgacgcaaaccgcgatagcaaccaagatccatcaggcgcttgatgctcatgctgatttcacggcgcagatcaccttcaacgacaaatttggcaacttcgtcacgcagcgtgtcgatttgtccttcagacagctcactgatcttaacatcttcagcgatacccgctgcagccaggatggctttagaacgggtcttgccgacgccataaatcgaagttaatgcgattacggcatgcttatgatcaggaatgttaatgcctgctatacgggccactatgcactcctactatttaatatgtacgttccatgctgaaaagcccgttttcaggatactcaaatggaaacgcacagacatacaaaagattggctggctaatctagccagctcaacccaactttgcaagaaaaatatgcgaaaaaatcagccttggcgctgtttatgcttcggctcggcactgcaaatcacacggatgacaccatcacgcttaacgattttgcagttacggcataatttcttgacggaagcacgaactttcatttttactctccgtaacttctcgggcgaccaattatcggccgtagcctttcaggttcgccttcttcaatgcagactcatactgactggacatcatcagagtttgcacttgagccataaagtccataatcacgacaacaacgataagcagtgaggtcccaccgaagtagaacggtactttcattgcatcacgcatgaactccgggatcaggcagataaaggtaatatacagcgcaccaaccagggtcaggcgggtcattactttatcgatatacttcgccgtttgctctcccggacgaattcctggtacaaatgcaccggacttcttcaggttatctgctgtttcacgcgggttgaaaaccaacgccgtgtagaagaaacagaagaagatgattgcagacgcatagagtaacacataaagcggttgcccaggctgcaaatacagcgaaattgttgtcagccagttccaaccagtaccgcccccgaaccatgacgcgatggtcgccgggaacagaataatactggaagcgaagattgccgggattacccccgccatattcactttcagcggtaaatgtgtgctctgtgcagcatagacacgacgaccttgctgacgtttcgcgtagtttaccacaatgcggcgttgaccacgctcaacaaatacaacaaagaacgtcactgcaaatactaatactgcaaccaacagcaacacgaggaagtgcaggtcgccttgacgcgcttgctcgatagtatgggcaatggctggcgggagtcccgcgacaataccggcgaagataatgattgaaataccgttgccgatacctcgttcagtgatctgttcgcccaaccacatcaggaacatcgttcctgtgaccagacttacaacagcggtgaagtagaatgcaaagcccgggttaatcaccaggccttgcataccaggcatattcggcagaccggtagcaataccgatcgactggaatattgccagcaccagagtaccgtaacgggtgtactggctgatcttacgacgaccagactccccttctttcttaatttctgccaacgttgggtgaaccaccgtcagcagctggataatgatcgacgccgaaatatacggcatgatccccagagcaaagatagaagcacggctgagagcaccaccagagaacatgttaaacatctcaatgatggtgcctcgctg
